(19) United States
(12) Patent Application Publication
(10) Pub. No.: US 2024/0000051 A1
(43) Pub. Date: Jan. 4, 2024

(54) INFLUENZA A-RESISTANT ANIMALS HAVING EDITED ANP32 GENES

(71) Applicant: Pig Improvement Company UK Limited, Basingstoke, Hampshire (GB)

(72) Inventors: Brian Burger, Madison, WI (US); Benjamin Beaton, DeForest, WI (US)

(73) Assignee: Pig Improvement Company UK Limited, Basingstoke, Hampshire (GB)

(21) Appl. No.: 18/253,024

(22) PCT Filed: Nov. 15, 2021
(86) PCT No.: PCT/GB2021/052942

§ 371 Date: May 15, 2023

Related U.S. Application Data
(60) Provisional application No. 63/114,084, filed on Nov. 16, 2020.

(51) Int. Cl. A01K 67/027; C12N 15/90; C12N 9/22

(52) U.S. Cl. CPC A01K 67/0275; C12N 15/907; C12N 9/22; A01K 2227/108; A01K 2217/075; C12N 2310/20

(57) ABSTRACT

Ungulate animals and offspring thereof comprising at least one modified chromosomal sequence in at least one gene encoding an ANP32 protein (e.g., a gene encoding an ANP32A protein or an ANP32B protein) are provided. Ungulate cells that contain such modified chromosomal sequences are also provided. The animals, offspring, and cells have increased resistance to type A influenza viruses. Methods for producing pathogen-resistant ungulate animals or lineages of ungulate animals are also provided.

### CROSS REFERENCE TO PRIOR APPLICATION

[0001] This application claims the benefit of and priority to U.S. Provisional application No. 63/114,084, filed on Nov. 16, 2020. This application is hereby incorporated by reference in its entirety.

### FIELD

[0002] The present disclosure relates to ungulate animals such as pigs and offspring thereof comprising at least one modified chromosomal sequence in at least one gene encoding an ANP32 protein (e.g., in a gene encoding ANP32A or ANP32B). The disclosure further relates to ungulate cells (e.g., porcine cells) comprising at least one modified chromosomal sequence in at least one gene encoding an ANP32 protein. The animals and cells have increased resistance to pathogens, including type A influenza virus. The disclosure further relates to methods for producing pathogen-resistant ungulate animals or lineages of ungulate animals.

### REFERENCE TO SEQUENCE LISTING SUBMITTED ELECTRONICALLY

[0003] The official copy of the sequence listing is submitted electronically via EFS-Web as an ASCII-formatted sequence listing with a file named “TD-7-2020-W01-SEQLST.txt” created on Nov. 11, 2021 and having a size of 1,361,770 bytes, and is filed concurrently with the specification. The sequence listing contained in this ASCII-formatted document is part of the specification and is herein incorporated by reference in its entirety.

### BACKGROUND

[0004] Influenza A viruses (IAVs) are enveloped, single stranded RNA viruses that cause an acute respiratory disease leading to substantial economic losses to the swine industry each year. To date, three major subtypes of IAVs (H1N1, H1N2, and H3N2) have been identified as being endemic in U.S. swine herds.

[0005] IAVs are considered to be one of the most important infectious disease agents affecting North American Swine (Sandbulte et al., 2015). IAVs cause substantial health problems in swine, including high fever, lethargy, anorexia, weight loss, nasal and ocular discharge, cough, sneezing, conjunctivitis, and breathing difficulties (Rajao et al., 2014; CDC, 2014; CFSPH, 2016). The disease progresses rapidly and may be complicated when associated with other respiratory pathogens, leading to pneumonia and severe clinical signs (Rajao et al., 2014). Swine influenza also causes substantial economic losses as a result of weight loss, reduced weight gain, and reproductive failure in infected sows due to high fevers (Rajao et al., 2014).

[0006] Moreover, swine IAVs pose a significant zoonotic threat to humans. Variants of the IAVs that normally infect pigs can emerge and cause disease in humans. For example, in spring of 2009, a new swine-origin H1N1 influenza A virus emerged in Mexico and the United States and spread worldwide by human-to-human transmission (Smith et al., 2009). The Centers for Disease Control and Prevention (CDC) estimated that over a one-year period from April 2009 through March 2010, approximately 60 million people were infected, resulting in approximately 12,000 deaths (CDC, 2010).

[0007] While vaccination of swine represents one strategy for controlling IAV infection, swine IAV strains are very diverse and prone to mutation and vaccines therefore often have disappointing efficacy in the field (Sandbulte et al., 2015). Furthermore, there has been a dramatic evolutionary expansion in IAV diversity in U.S. swine since 1998, resulting in co-circulation of many antigenically and genetically distinct IAV strains and complicating the control of swine influenza (Rajao et al., 2014; see also CFSPH, 2016). Vaccine efficacy has been compromised by this rapid evolution of influenza viruses, resulting in suboptimal protection against distantly related strains (Rajao et al., 2014). Moreover, vaccines eliminate or reduce clinical signs, but do not always prevent infections or virus shedding, though the amount of virus shed may be reduced (CFSPH, 2016). In addition, vaccine-associated respiratory disease (VAERD), which is characterized by severe respiratory disease, can occur with traditional inactivated vaccines when vaccine virus strains are mismatched with the infecting strain (Rajao et al., 2014).

[0008] There is therefore a need in the art for development of additional strategies for the control of IAVs in swine.

### SUMMARY

[0009] In general, the present teachings provide for and include a Sus scrofa that comprises an exogenous stop codon in an ANP32 gene, wherein there is reduced or absent ANP32 activity, and wherein the Sus scrofa is resistant to influenza virus. In some embodiments, a Sus scrofa having a genome comprising a genetically edited endogenous ANP32 gene, which can comprise an ANP32A gene or an ANP32B gene, wherein the edited ANP32 gene can comprise a premature stop codon relative to a wild-type gene. In some configurations, the premature stop codon can be upstream of N129 and D130. In various configurations, the genetically edited endogenous ANP32 gene can comprise SEQ ID NO: 7577 or SEQ ID NO: 7578.

[0010] In various configurations, the exogenous stop codon confers resistance to an influenza virus. In some configurations, the influenza virus can comprise a type A influenza virus. In various configurations, the type A influenza virus can comprise an H1N1 subtype virus, an H1N2 subtype virus, or an H3N2 subtype virus.

[0011] In various configurations, the animal, offspring, or cell can be heterozygous for the genetically edited endogenous ANP32 gene. In various configurations, the animal, offspring, or cell can be homozygous for the genetically edited endogenous ANP32 gene.

[0012] Also provided for is a cell isolated from a Sus scrofa edited as described herein.

[0013] Also provided for is an isolated cell line obtained from a Sus scrofa of the present teachings. In some configurations, the isolated cell line can be an isolated fibroblast line.

[0014] In various embodiments, the present teachings provide for and include a pair of guide RNAs (gRNAs) for editing a Sus scrofa ANP32 gene which can be SEQ ID NO: 33 and SEQ ID NO: 40, SEQ ID NO: 19 and SEQ ID NO: 26, SEQ ID NO: 44 and SEQ ID NO: 46, SEQ ID NO: 55 and SEQ ID NO: 58; or SEQ ID NO: 55 and SEQ ID NO: 59. In some configurations, the gRNAs can be SEQ ID NO: 26 and SEQ ID NO: 19 or SEQ ID NO:55 and SEQ ID NO: 59.

[0015] The present disclosure also provides for and includes a method of making a Sus scrofa resistant to an influenza virus which can comprise: introducing into a Sus scrofa MIT oocyte or zygote a CAS protein and a pair of gRNAs that introduce a premature stop codon into an endogenous ANP32 gene, wherein a stop codon can be introduced into an endogenous ANP32 gene of the oocyte or zygote; implanting an embryo obtained from the oocyte or zygote into a recipient female such that a Sus scrofa can be obtained from the implanted embryo, wherein the Sus scrofa obtained can be heterozygous for the ANP32 gene comprising a premature stop codon; breeding the heterozygous Sus scrofa to a Sus scrofa of opposite sex that can also comprise a premature stop codon in the ANP32 gene; selecting offspring from the breeding that are homozygous for the premature stop codon in the ANP32 gene, wherein these homozygous offspring are resistant to influenza. In some configurations, the pair of gRNAs can comprise sequences consisting of SEQ ID NO: 26 and SEQ ID NO: 19 or SEQ ID NO: 55 and SEQ ID NO: 59. In various configurations, the CAS protein and the gRNAs can be introduced as a pre-formed ribonucleoprotein (RNP) complex. In various configurations, the premature stop codon comprises the nucleic acid sequence consisting of SEQ ID NO: 7577 or SEQ ID NO: 7578.

[0016] The present disclosure also provides for and includes a method of making a Sus scrofa that can be resistant to an influenza virus comprising: introducing into a Sus scrofa MII oocyte or zygote a CAS protein and a pair of gRNAs that can introduce a premature stop codon into an endogenous ANP32 gene, wherein a stop codon can be introduced into an endogenous ANP32 gene of the oocyte or zygote; implanting an embryo obtained from the oocyte or zygote into a recipient female such that a Sus scrofa can be obtained from the implanted embryo, wherein the Sus scrofa obtained can be homozygous for the ANP32 gene comprising a premature stop codon; wherein the homozygous Sus scrofa can be resistant to influenza. In some configurations, the pair of gRNAs can comprise sequences consisting of SEQ ID NO: 26 and SEQ ID NO: 19 or SEQ ID NO: 55 and SEQ ID NO: 59. In various configurations, the CAS protein and the gRNAs can be introduced as a pre-formed ribonucleoprotein (RNP) complex. In various configurations, the premature stop codon comprises the nucleic acid sequence consisting of SEQ ID NO: 7577 or SEQ ID NO: 7578.

[0017] The present teachings also provide for and include ANP32 gene edited to confer Influenza resistance in Sus scrofa wherein the edit introduces an exogenous stop codon and the edited ANP32 gene comprises SEQ US NO: 7577 or SEQ ID NO: 7578. In some configurations, the edit is created using SEQ ID NO: 26 and SEQ ID NO: 19 or SEQ ID NO: 55 and SEQ ID NO:59.

[0018] In various embodiments, the present teachings provide for and include a non-reproductive Sus scrofa gene comprising an ANP32 gene of the present teachings. In various configurations, the present teachings also provide for cell line comprising a plurality of the non-reproductive ANP32 cell. In some configurations, the cell line can be a fibroblast cell line.

[0019] Ungulate animals and offspring thereof are provided. The animals and offspring comprise at least one modified chromosomal sequence in at least one gene encoding an ANP32 protein.

[0020] Ungulate cells are also provided. The cells comprise at least one modified chromosomal sequence in at least one gene encoding an ANP32 protein.

[0021] A method for producing an ungulate animal or lineage of ungulate animals having reduced susceptibility to a pathogen is provided. The method comprises modifying an ungulate oocyte or an ungulate sperm cell to introduce a modified chromosomal sequence in a gene encoding an ANP32 protein into at least one of the oocyte and the sperm cell, and fertilizing the oocyte with the sperm cell to create a fertilized egg containing the modified chromosomal sequence in the gene encoding the ANP32 protein. The method further comprises transferring the fertilized egg into a surrogate female ungulate animal, wherein gestation and term delivery produces a progeny animal.

[0022] Another method for producing an ungulate animal or lineage of ungulate animals having reduced susceptibility to a pathogen is provided. The method comprises modifying an ungulate fertilized egg to introduce a modified chromosomal sequence in a gene encoding an ANP32 protein into the fertilized egg. The method further comprises transferring the fertilized egg into a surrogate female ungulate animal, wherein gestation and term delivery produces a progeny animal.

[0023] A further method for producing an ungulate animal or a lineage of ungulate animals having reduced susceptibility to infection by a pathogen is provided. The method comprises enucleating an ungulate oocyte, modifying a donor ungulate somatic cell to introduce a modified chromosomal sequence into a gene encoding an ANP32 protein, fusing the oocyte with the modified donor ungulate somatic cell, and activating the oocyte to produce an embryo.

[0024] A method of increasing an ungulate animal's resistance to infection with a pathogen is provided. The method comprises modifying at least one chromosomal sequence in at least one gene encoding an ANP32 protein, so that production or activity of the ANP32 protein is reduced, as compared to production or activity of the same ANP32 protein in an ungulate animal that does not comprise a modified chromosomal sequence in the gene encoding the ANP32 protein.

[0025] In any of the ungulate animals, offspring, cells, or methods described herein, the gene encoding the ANP32 protein can be a gene encoding an ANP32A protein or a gene encoding an ANP32B protein.

[0026] A population of ungulate animals is provided. The population comprises two or more of any of the ungulate animals and/or offspring thereof described herein.

[0027] Another population of ungulate animals is provided. The population comprises two or more animals made by any of the methods described herein and/or offspring thereof.

[0028] Guide RNAs (gRNAs) are provided. The gRNA can comprise a nucleotide sequence of any one of SEQ ID NOs. 15-7,576.

[0029] Other objects and features will be in part apparent and in part pointed out hereinafter.

### DETAILED DESCRIPTION

[0030] The acidic (leucine-rich) nuclear phosphoprotein 32 kDa (ANP32) family of proteins is made up of small, evolutionarily conserved proteins characterized by an amino-terminal leucine-rich repeat domain and a carboxy-terminal low-complexity acidic region (Reilly et al., 2014). The mammalian members of the ANP32A family—ANP32A, ANP32B, and ANP32E—have physiologically diverse functions, including chromatin modification and remodeling, apoptotic caspase modulation, protein phosphatase inhibition, transcription regulation, and regulation of intracellular transport (Reilly et al., 2014; Staller et al., 2014). In addition, ANP32 proteins have been found to be dysregulated in an array of cancers (Reilly et al., 2014). ANP32 proteins interact with the IAV polymerase and are needed for viral replication. In human cells, an ANP32A/ANP32B double knockout nearly completely eliminated viral polymerase activity and viral replication (Staller et al., 2014).

[0031] The Sus scrofa (pig) genome contains several homologs of human ANP32A, including ANP32A and ANP32B (also referred to as NANS). Porcine ANP32A and ANP32B genes encode asparagine (N) at position 129 (N129) and aspartic acid (D) at position 130 (D130), amino acids that have been identified as being required for interaction of human and chicken ANP32 proteins with the influenza A viral polymerase (Staller et al., 2019; Baker et al., 2019). As described further hereinbelow, in order to generate IAV-resistant pigs, the present inventors designed editing strategies to modify porcine ANP32A and ANP32B genes. For example, editing strategies were designed to introduced stop codons in conserved exonic sequences of the porcine ANP32A and ANP32B genes upstream of the regions of the genes coding for N129 and D130. Examples of sequences edited to comprise the exogenous stop codons include SEQ ID NOs: 7577 and 7578

[0032] Accordingly, the present invention is directed to ungulate animals and offspring thereof comprising at least one modified chromosomal sequence in at least one gene encoding an ANP32 protein. The invention further relates to ungulate cells comprising at least one modified chromosomal sequence in at least one gene encoding an ANP32 protein. The animals and cells have increased resistance to pathogens, including influenza A viruses.

[0033] The animals and cells have chromosomal modifications (e.g., insertions, deletions, or substitutions) that inactivate or otherwise modulate ANP32A and/or ANP32B gene activity. Since ANP32 proteins are needed for viral replication of IAVs, the animals and cells having modified ANP32 genes display resistance to IAVs when challenged.

[0034] Populations of any of the animals described herein are also provided.

[0035] The present invention is further directed to methods for producing pathogen-resistant ungulate animals and lineages of such animals. The methods comprise introducing a modified chromosomal sequence into a gene encoding an ANP32 protein.

[0036] Guide RNAs for use in creating the animals and cells are also provided.

[0037] The animals, offspring, cells, populations of animals, methods, and guide RNAs are further described hereinbelow.

### Definitions

[0038] When introducing elements of the present invention or the preferred embodiments(s) thereof, the articles “a,” “an,” “the,” and “said” are intended to mean that there are one or more of the elements.

[0039] The term “and/or” means any one of the items, any combination of the items, or all of the items with which this term is associated.

[0040] A “binding protein” is a protein that is able to bind to another molecule. A binding protein can bind to, for example, a DNA molecule (a DNA-binding protein), an RNA molecule (an RNA-binding protein) and/or a protein molecule (a protein-binding protein). In the case of a protein-binding protein, it can bind to itself (to form homodimers, homotrimers, etc.) and/or it can bind to one or more molecules of a different protein or proteins. A binding protein can have more than one type of binding activity. For example, zinc finger proteins have DNA-binding, RNA-binding and protein-binding activity.

[0041] The terms “comprising,” “including,” and “having” are intended to be inclusive and mean that there may be additional elements other than the listed elements. The term “CRISPR” stands for “clustered regularly interspaced short palindromic repeats.” CRISPR systems include Type I, Type II, and Type III CRISPR systems.

[0042] The term “Cas” refers to “CRISPR associated protein.” Cas proteins include but are not limited to Cas9 family member proteins, Cas6 family member proteins (e.g., Csy4 and Cas6), Cas5 family member proteins, and Cas12 family member proteins.

[0043] The term “Cas9” can generally refer to a polypeptide with at least about 5%, 10%, 20%, 30%, 40%, 50%, 60%, 70%, 80%, 90%, 95%, 98%, 99%, 99.5%, 99.9% or 100% sequence identity and/or sequence similarity to a wild-type Cas9 polypeptide (e.g., Cas9 from S. pyogenes). Illustrative Cas9 sequences are provided by SEQ ID NOs. 1-256 and 795-1346 of U.S. Patent Publication No. 2016/0046963. SEQ ID NOs. 1-256 and 795-1346 of U.S. Patent Publication No. 2016/0046963 are hereby incorporated herein by reference. “Cas9” can refer to can refer to a polypeptide with at most about 5%, 10%, 20%, 30%, 40%, 50%, 60%, 70%, 80%, 90%, 95%, 98%, 99%, 99.5%, or 99.9%, 100% sequence identity and/or sequence similarity to a wild type Cas9 polypeptide (e.g., from S. pyogenes). “Cas9” can refer to the wild-type or a modified form of the Cas9 protein that can comprise an amino acid change such as a deletion, insertion, substitution, variant, fusion, chimera, or any combination thereof.

[0044] The term “Cas5” can generally refer to can refer to a polypeptide with at least about 5%, 10%, 20%, 30%, 40%, 50%, 60%, 70%, 80%, 90%, 95%, 98%, 99%, 99.5%, 99.9%, or 100% sequence identity and/or sequence similarity to a wild type illustrative Cas5 polypeptide (e.g., Cas5 from D. vulgaris). Illustrative Cas5 sequences are provided in FIG. 42 of U.S. Patent Publication No. 2016/0046963. FIG. 42 of U.S. Patent Publication No. 2016/0046963 is hereby incorporated herein by reference. “Cas5” can generally refer to can refer to a polypeptide with at most about 5%, 10%, 20%, 30%, 40%, 50%, 60%, 70%, 80%, 90%, 95%, 98%, 99%, 99.5%, 99.9%, or 100% sequence identity and/or sequence similarity to a wild-type Cas5 polypeptide (e.g., a Cas5 from D. vulgaris). “Cas5” can refer to the wild-type or a modified form of the Cas5 protein that can comprise an amino acid change such as a deletion, insertion, substitution, variant, fusion, chimera, or any combination thereof.

[0045] The term “Cas6” can generally refer to can refer to a polypeptide with at least about 5%, 10%, 20%, 30%, 40%, 50%, 60%, 70%, 80%, 90%, 95%, 98%, 99%, 99.5%, 99.9%, or 100% sequence identity and/or sequence similarity to a wild type illustrative Cas6 polypeptide (e.g., a Cas6 from T. thermophilus). Illustrative Cas6 sequences are provided in FIG. 41 of U.S. Patent Publication No. 2016/0046963. FIG. 41 of U.S. Patent Publication No. 2016/0046963 is hereby incorporated herein by reference. “Cas6” can generally refer to can refer to a polypeptide with at most about 5%, 10%, 20%, 30%, 40%, 50%, 60%, 70%, 80%, 90%, 95%, 98%, 99%, 99.5%, 99.9%, or 100% sequence identity and/or sequence similarity to a wild-type Cas6 polypeptide (e.g., from T. thermophilus). “Cas6” can refer to the wildtype or a modified form of the Cas6 protein that can comprise an amino acid change such as a deletion, insertion, substitution, variant, fusion, chimera, or any combination thereof.

[0046] The terms “CRISPR/Cas9” or “CRISPR/Cas9 system” refer to a programmable nuclease system for genetic editing that includes a Cas9 protein, or derivative thereof, and one or more non-coding guide RNAs (“gRNAs”) that provide the function of a CRISPR RNA (crRNA) and trans-activating RNA (tracrRNA) for the Cas9. The crRNA and tracrRNA can be separate RNA molecules or can be combined into a single RNA molecule to produce a “single guide RNA” (sgRNA). The crRNA or the cRNA portion of the sgRNA provide sequence that is complementary to the genomic target.

[0047] “Disease resistance” is a characteristic of an animal, wherein the animal avoids the disease symptoms that are the outcome of animal-pathogen interactions, such as interactions between a porcine animal and an influenza A virus. That is, pathogens are prevented from causing animal diseases and the associated disease symptoms, or alternatively, a reduction of the incidence and/or severity of clinical signs or reduction of clinical symptoms. One of skill in the art will appreciate that the compositions and methods disclosed herein can be used with other compositions and methods available in the art for protecting animals from pathogen attack.

[0048] By “encoding” or “encoded”, with respect to a specified nucleic acid, is meant comprising the information for translation into the specified protein. A nucleic acid encoding a protein may comprise intervening sequences (e.g., introns) within translated regions of the nucleic acid, or may lack such intervening non-translated sequences (e.g., as in cDNA). The information by which a protein is encoded is specified by the use of codons. Typically, the amino acid sequence is encoded by the nucleic acid using the “universal” genetic code. When the nucleic acid is prepared or altered synthetically, advantage can be taken of known codon preferences of the intended host where the nucleic acid is to be expressed.

[0049] As used herein, “gene editing,” “gene edited”, “genetically edited” and “gene editing effectors” refer to the use of homing technology with naturally occurring or artificially engineered nucleases, also referred to as “molecular scissors,” “homing endonucleases,” or “targeting endonucleases.” The nucleases create specific double-stranded chromosomal breaks (DSBs) at desired locations in the genome, which in some cases harnesses the cell's endogenous mechanisms to repair the induced break by natural processes of homologous recombination (HR) and/or nonhomologous end-joining (NHEJ). Gene editing effectors include Zinc Finger Nucleases (ZFNs), Transcription Activator-Like Effector Nucleases (TALENs), Clustered Regularly Interspaced Short Palindromic Repeats (CRISPR) systems (e.g., CRISPR/Cas9 systems), and meganucleases (e.g., meganucleases re-engineered as homing endonucleases). The terms also include the use of transgenic procedures and techniques, including, for example, where the change is a deletion or relatively small insertion (typically less than 20 nt) and/or does not introduce DNA from a foreign species. The term also encompasses progeny animals such as those created by sexual crosses or asexual propagation from the initial gene edited animal.

[0050] The terms “genome editing,” “genetic editing,” and “genetically edited,” can refer to altering the genome by deleting, inserting, substituting, or otherwise altering specific nucleic acid sequences. The altering can be gene or location specific. Genome editing can use nucleases to cut a nucleic acid thereby generating a site for the edit. Editing of non-genomic nucleic acid is also contemplated. A protein containing a nuclease domain can bind and cleave a target nucleic acid by forming a complex with a nucleic acid-targeting nucleic acid. In one example, the cleavage can introduce double stranded breaks in the target nucleic acid. A nucleic acid can be repaired e.g., by endogenous non-homologous end joining (NHEJ) machinery or homology directed repair (HDR) machinery. The former does not rely on a template DNA to repair and can often lead to insertions or deletions in the target nucleic acid. HDR requires a template DNA and therefore can result in higher fidelity repair and allow for substitutions (e.g., single nucleotide substitutions) in the target nucleic acid with minimal disruption in surrounding areas. In a further example, a piece of nucleic acid can be inserted. Modifications of nucleic acid-targeting nucleic acids and site-directed polypeptides can introduce new functions to be used for genome editing.

[0051] As used herein “homing DNA technology,” “homing technology” and “homing endonuclease” include any mechanisms that allow a specified molecule to be targeted to a specified DNA sequence including Zinc Finger (ZF) proteins, Transcription Activator-Like Effectors (TALEs), meganucleases, and CRISPR systems (e.g., CRISPR/Cas9 systems).

[0052] The terms “increased resistance” and “reduced susceptibility” herein mean, but are not limited to, a statistically significant reduction of the incidence and/or severity of clinical signs or clinical symptoms which are associated with infection by pathogen. For example, “increased resistance” or “reduced susceptibility” can refer to a statistically significant reduction of the incidence and/or severity of clinical signs or clinical symptoms which are associated with infection by influenza A in an animal comprising a modified chromosomal sequence in an ANP32 gene as compared to a control animal having an unmodified chromosomal sequence. The term “statistically significant reduction of clinical symptoms” means, but is not limited to, the frequency in the incidence of at least one clinical symptom in the modified group of subjects is at least 10%, preferably at least 20%, more preferably at least 30%, even more preferably at least 50%, and even more preferably at least 70% lower than in the non-modified control group after the challenge with the infectious agent.

[0053] “Knock-out” means disruption of the structure or regulatory mechanism of a gene. Knock-outs may be generated through homologous recombination of targeting vectors, replacement vectors, or hit-and-run vectors or random insertion of a gene trap vector resulting in complete, partial or conditional loss of gene function.

[0054] Herein, “reduction of the incidence and/or severity of clinical signs” or “reduction of clinical symptoms” means, but is not limited to, reducing the number of infected subjects in a group, reducing or eliminating the number of subjects exhibiting clinical signs of infection, or reducing the severity of any clinical signs that are present in one or more subjects, in comparison to infection of wild-type subjects. For example, these terms encompass any clinical signs of infection, lung pathology, viremia, antibody production, reduction of pathogen load, reduction in pathogen shedding, reduction in pathogen transmission, or reduction of any clinical sign symptomatic of influenza A. Preferably these clinical signs are reduced in one or more animals of the invention by at least 10% in comparison to subjects not having a modification in the ANP32 gene and that become infected. More preferably clinical signs are reduced in subjects of the invention by at least 20%, preferably by at least 30%, more preferably by at least 40%, and even more preferably by at least 50%.

[0055] References herein to a deletion in a nucleotide sequence from nucleotide x to nucleotide y mean that all of the nucleotides in the range have been deleted, including x and y. Thus, for example, the phrase “a 100 base pair deletion from nucleotide 1,000 to nucleotide 1,099 as compared to SEQ ID NO: X” means that each of nucleotides 1,000 through 1,099 have been deleted, including nucleotides 1,000 and 1,099.

[0056] “Resistance” of an animal to a disease is a characteristic of an animal, wherein the animal avoids the disease symptoms that are the outcome of animal-pathogen interactions, such as interactions between a porcine animal and influenza A. That is, pathogens are prevented from causing animal diseases and the associated disease symptoms, or alternatively, a reduction of the incidence and/or severity of clinical signs or reduction of clinical symptoms. One of skill in the art will appreciate that the methods disclosed herein can be used with other compositions and methods available in the art for protecting animals from pathogen attack.

[0057] A “TALE DNA binding domain” or “TALE” is a polypeptide comprising one or more TALE repeat domains/units. The repeat domains are involved in binding of the TALE to its cognate target DNA sequence. A single “repeat unit” (also referred to as a “repeat”) is typically 33-35 amino acids in length and exhibits at least some sequence homology with other TALE repeat sequences within a naturally occurring TALE protein. Zinc finger and TALE binding domains can be “engineered” to bind to a predetermined nucleotide sequence, for example via engineering (altering one or more amino acids) of the recognition helix region of naturally occurring zinc finger or TALE proteins. Therefore, engineered DNA binding proteins (zinc fingers or TALEs) are proteins that are non-naturally occurring. Non-limiting examples of methods for engineering DNA-binding proteins are design and selection. A designed DNA binding protein is a protein not occurring in nature whose design/composition results principally from rational criteria. Rational criteria for design include application of substitution rules and computerized algorithms for processing information in a database storing information of existing ZFP and/or TALE designs and binding data. See, for example, U.S. Pat. Nos. 6,140,081; 6,453,242; and 6,534,261; see also WO 98/53058; WO 98/53059; WO 98/53060; WO 02/016536 and WO 03/016496 and U.S. Publication No. 20110301073.

[0058] A “zinc finger DNA binding protein” (or binding domain) is a protein, or a domain within a larger protein, that binds DNA in a sequence-specific manner through one or more zinc fingers, which are regions of amino acid sequence within the binding domain whose structure is stabilized through coordination of a zinc ion. The term zinc finger DNA binding protein is often abbreviated as zinc finger protein or ZFP.

[0059] A “selected” zinc finger protein or TALE is a protein not found in nature whose production results primarily from an empirical process such as phage display, interaction trap or hybrid selection. See e.g., U.S. Pat. Nos. 5,789,538; 5,925,523; 6,007,988; 6,013,453; 6,200,759; WO WO 96/06166; WO 98/53057; WO 98/54311; WO 00/27878; WO 01/60970 WO 01/88197, WO 02/099084 and U.S. Publication No. 20110301073.

[0060] The term “breeding” as used herein refers to a process comprising the selection of superior male and superior female animals use for creation of the next generation of offspring. This process further comprises the union of male and female gametes so that fertilization occurs. Such a union may be brought about by mating (copulation) or by in vitro or in vivo artificial methods. Such artificial methods can include, but are not limited to, artificial insemination, surgical assisted artificial insemination, in vitro fertilization, intracytoplasmic sperm injection, zona drilling, in vitro culture of fertilized oocytes, ovary transfer, and ovary splitting. The term “breeding” as used herein also can include transferring of a fertilized oocyte into the reproductive tract of a female animal in order to allow for more offspring from a particular elite female.

[0061] As used herein, “ANP32” can refer to an ANP32A or ANP32B gene or protein. Skilled persons will be able to determine whether a gene or protein is being referred to by the context of the reference.

[0062] Various other terms are defined hereinbelow.

### Animals and Cells Having a Modified Chromosomal Sequence in a Gene Encoding an ANP32 Protein

[0063] Described herein are ungulate animals and offspring thereof, and ungulate cells comprising at least one modified chromosomal sequence in at least one gene encoding the ANP32 protein. For example, the animals, offspring, or cell can have an insertion or deletion (“INDEL”) which confers improved or complete resistance to infection by a pathogen (e.g., an influenza A virus).

[0064] The ungulate animal or offspring can be selected from the group consisting of pigs, cattle, horses, sheep, goats, buffalo, bison, alpacas, llamas, yaks, deer, elk, and camels. Likewise, the ungulate cell can be derived from an animal selected from the group consisting of pigs, cattle, horses, sheep, goats, buffalo, bison, alpacas, llamas, yaks, deer, elk, and camels.

[0065] For example, the ungulate animal or offspring can be pigs or cattle (e.g., beef or dairy cattle). The ungulate cell can be a porcine cell or a bovine cell.

[0066] The ungulate animal or offspring can be a pig. The ungulate cell can be a porcine cell.

[0067] Porcine ANP32A has two isoforms, the complete nucleotide sequences of which can be found in the Ensembl database under Accession Numbers ENSSSCT00000005475.4 and ENSSSCT00000070641.1. Both of the porcine ANP32A isoforms align with human ANP32A, but the porcine ANP32A isoform encoded by ENSSSCT00000005475.4 aligns more closely with human ANP32A. The complete nucleotide sequence for ENSSSCT00000005475.4 is provided herein as SEQ ID NO: 1. SEQ ID NO: 1 is the sequence for the “top” strand, and ANP32A is encoded on the complementary “bottom” strand. Accordingly, for ease of reference, the reverse complement of the “bottom” coding strand was generated, so that the sequence could be read from left to right. This reverse complement sequence is provided as SEQ ID NO: 2. In addition, a partial version of SEQ ID NO: 2 is provided as SEQ ID NO: 3. SEQ ID NO: 3 is used as a reference sequence herein. SEQ ID NO: 3 includes nucleotides 2,588-34,583 of SEQ ID NO: 2, corresponding to exon 1, intron 1, exon 2, intron 2, exon 3, intron 3, and exon 4 of the ANP32A gene. Table 1 provides the locations of the exons and introns of the ANP32A gene in SEQ ID NOs. 2 and 3.

TABLE 1
Locations of exons and introns of the
ANP32A gene in SEQ ID NOs. 2 and 3

| | Location in SEQ ID NO: | Location in SEQ ID NO: |
|---|---|---|
| | 2 (nucleotides) | 3 (nucleotides) |
| Exon 1 | 2,588-2,785* | 1-198* |
| Intron 1 | 2,786-32,017 | 199-29,430 |
| Exon 2 | 32,018-32,167 | 29,431-29,580 |
| Intron 2 | 32,168-32,305 | 29,581-29,718 |
| Exon 3 | 32,306-32,428 | 29,719-29,841 |
| Intron 3 | 32,429-34,384 | 29,842-31,797 |
| Exon 4 | 34,385-34,583** | 31,798-31,996** |
| Intron 4 | 34,584-35,763 | — |
| Exon 5 | 35,764-35,861 | — |
| Intron 5 | 35,862-38,019 | — |
| Exon 6 | 38,020-38,083 | — |
| Intron 6 | 38,084-38,328 | — |
| Exon 7 | 38,329-39,564 | — |

*Exon 1 of the ANP32A gene includes a 5′ untranslated region (5′-UTR) at nucleotides 2,588-2,731 of SEQ ID NO: 2 and nucleotides 1-144 of SEQ ID NO: 3. The start codon is at nucleotides 2,732-2,734 of SEQ ID NO: 2 and nucleotides 145-147 of SEQ ID NO: 3.
**Exon 4 of the ANP32A gene includes the nucleotides that encode asparagine 129 (N129) and aspartic acid 130 (D130). These amino acids are encoded by nucleotides 34,442-34,447 of SEQ ID NO: 2 and nucleotides 31,855-31,860 of SEQ ID NO: 3.

[0068] Table 2 provides an annotated version of SEQ ID NO: 3, showing the locations of exons 1, 2, 3, and 4. Exons 1, 2, 3, and 4 are shown in underlined text. Coding sequence is both underlined and bold, while untranslated sequence that is part of exon 1 is underlined only. The codons that encode asparagine 129 (N129) and aspartic acid 130 (D130) are shown in uppercase text.

TABLE 2
Annotated version of reference sequence SEQ ID NO: 3 (partial ANP32A
gene sequence)
SEQ ID NO: 3

| | |
|---|---|
| 1 | agtgtgcgcc gcgggtgctg ggggctcgag aaccgagcgg agctggttga gccttcaaag |
| 61 | tcctaaaacg cgcggccgtg ggttcggggt ttattgattg aattccgccg gcgcgggagc |
| 121 | ctctgcagag agagagcgcg agagatggag atggacaaac ggattcattt agagctgcgg |
| 181 | aacaggacgc cctctgatgt gagcatttgc caaaaatatc tctgtcggtc cattctccta |
| 241 | ctttgtgtgt gtgtgtgtgc gttgggggga ggcacttttt ttgggggggg cgcctaggag |
| 301 | atgtgggttt gggggtcgga ctgcaaatga attgcaaggt tggggggttg caatgccatc |
| 361 | cgatcatttt ctggctgtcg ccgccgctgc ccttggtgtg tgactacctg tgcgtgtgct |
| 421 | cccgcgtgtg cgagtgtggg tgcgagagtg tgcgtgcgag tgtgcaccca tcgggggcca |
| 481 | gcgggcgcac gcgtttgggt cggagagaat gaggcagaat aaccctctga gctcgctgct |
| 541 | cgcgtgactc cgtctagggg aaagattaac gagggaggag gaggagaggg gctgcctcct |
| 601 | ggatttaaca acaaaaaaag ggggttttat attttataaa tgaatccccc cttcctcccc |
| 661 | cctcccgcgc cttccccctc cctttctccc tctctctccg tctctctctc tctctctctc |
| 721 | gctcgcacac acacaataag ttttgggctt cgcgagtccg gtttagtttc tgataaatgt |
| 781 | gggccgaggc ccctggggag agcgcatggg gagggggctg cagcggagtt gggaatggct |
| 841 | cgagtttaaa gtgcgtcttc atttctttgc agtgatgagg cgagagacgg gggagccata |
| 901 | tttgtaactt tgtagtgttc gtgaacgcgc cctttctctc cctccctccc tttctctgcc |
| 961 | tcctttcctc tectcctctt tctccctcac tctttccacc ccaccttcgg gccagatgct |
| 1021 | gatgtttctt cctttccttc tgaagggaag ataaattgga agaagggggg ggagggattt |
| 1081 | tcgaacgtgc aaaggcacag ataatccccg cgcctcccca cctcgcgcga tcgctactgc |
| 1141 | aagttaccca aaggctaagt ccaggtcctc cctctccccc ttgctccttc cagcctccct |
| 1201 | aaggtgccag ccttcgagcc gtggcgcccc ccggcaccga cccctggcct gtcttgtctc |
| 1261 | tagggtgggc tccttggcag ccattcggcg acgggttaat aaatgggccc gggaaacttt |
| 1321 | gtcaggacgc gagctgccca gagctggtgc ccgtggtggg tattggctgg gtccagattt |
| 1381 | atgcgggcat aacagacacg cagctccggg atgggagttt gccttcccgt cgccgttatt |
| 1441 | gattgggcag aggcgcgagt acggccagag gaaacttaca cggatgggaa cccggaggct |
| 1501 | ctggccaaag cccaccccta aggaggggaa aggtgagggt gggttactcg aacgaacacc |
| 1561 | cgtttttatt tctgtctccc tctcgctttc agtgttttat gtgagttggc ggctcagcgg |
| 1621 | aggagaccca gggtctgggg tggagacgct ggccgactgc cctcgtggca cctcccggga |
| 1681 | caagcggagc gcgggcggag gaaccccgca cccccagccc gggtggccgg ggttccacag |
| 1741 | agttgggagt ttgggtagca ctgtgcgctg acctgtcgcc gcttcagccc gttaaaaccc |
| 1801 | gaatccctgg cggaggcagg ccttgcttcc tcttttctct agttcctccc ccaaacctga |
| 1861 | gtgagacttt tgaaaacaag atcctttttg tgccccccca tcataacgca gctgtggact |
| 1921 | gtcgacgtgc agtgccttat ggcgcgcagg gcggggaggg ggtggcggag ggaggggagg |
| 1981 | ggttgcccgc ccgaggacgc aggagtttcc gcgaacaatt tgccggcggt ttgcctttct |
| 2041 | ctggccggtt tcatcccagc ttggacccgg agccggagga ctggggggct gggtgtggtg |
| 2101 | atgggggagg gggcccgagc cgcgggcttc ccgcgtactt tccggaagcc ccccgtgcgg |
| 2161 | agggggaagg gcgccgagta gggggtcggg gtcgcggcgg gagggtgtgg aggcgcggtt |
| 2221 | cgcccggcct accccatccc cgctgctggc caactgggag cgagatcgaa agcgggtcga |
| 2281 | accggctctt taaacttcgc cgagtgtgtg ctgggggagg ggagcgcgcc gcgccgaact |
| 2341 | gggagcgatt tctcacgctt cgccccctcg cctccgagcc tcccggccca cacgcctgcc |
| 2401 | ccctgccttg aggcggggtg gggcgcgggt gagggtggag ggggcacttt ctgcccgttt |
| 2461 | ggggaggagg gggagaaagc tagctaatga gggacaaaag gggtggggga ggagaaactg |
| 2521 | gtctttttaa acgttcttaa gataaatagc tcccggagaa ctccccctgc gcccctcccc |
| 2581 | gccgtgctct cccccgggtc ccctcacacc caccttcgga gcctctccca actctgatcc |
| 2641 | gagggccggt ggccacgccg cgacgccgaa ataggacgag cagccatgtt tcccgggtct |
| 2701 | cgcgcggccc gccccgcccc tcccccatgg cgcggccggc gccgagcgcg gggctccgaa |
| 2761 | tgcgggcgcc aggctccatg tggcgcgggg tgcgggctgg ttggcaggcg accgggtggc |
| 2821 | ctggccctgt gcgcgcaggt cgggtcgcgg ccgcgccggg ctggcccccg ggcgggcctt |
| 2881 | ttggctttcc gagctggttt tgagctcaag gtgttttatt tattattgtt gtttttttaa |
| 2941 | cggccgaagc cgcccgaggc cgaatccgaa ggggcgccga ggcgttatgg ggggggcagg |
| 3001 | gacggccgcc agggtcctgg tcgcctgtgg cacgactgct gggcgccggg ctgccatttt |
| 3061 | gtcaccgtgg ctgttgtcgc tgttgggggg gggacgcaga ctcttgcgcc atcgccccga |
| 3121 | cggccccgga cctggagaca gcagggggag ccggtcccag ggaccacccc ccccagttgt |
| 3181 | actctgggcc cccatgccgg tcccctccct gtgccaactg cctgaggctc tgctggagcg |
| 3241 | ccgcggcggc cgtggctccg tagggtgacg atcctccctg cgagtgctcc ccccaccccc |
| 3301 | cggcgcgttc tctgcctccc ccgcccctct tctcgccagt atctcgccct tcctcctgca |
| 3361 | ggcgttttag ccgtagttaa atgtggccct aaagacgaac ggatcgccct ggtgtttgct |
| 3421 | ctttggcgga agtgatagga gggtgggggg agaaattaaa caagaggttt cttttggggg |
| 3481 | aggcgggtgc gcacgcgact ctagcggccc tgactgaagc caagaaggca gccgtttacc |
| 3541 | cgggagggac gagttgatgc gttggggaaa cgccctcagg ggctgggctc tccgggaagg |
| 3601 | taggtcgcgc tccgcgtttc aggtgggtgt tgcagcgccc tgctggctgc taggggaggc |
| 3661 | ccccttgctc tttttctgct cctccccctt ttatttgtgc ccaagggaag gcagctacag |
| 3721 | tagtaaaagt aaccctaaac ggaaaagaat agggagtaag gtttgccttt taaaaagtaa |
| 3781 | atgtcttttt ccaaccacct ttctctggct cttgactcca gagccaggaa gggcatcgcg |
| 3841 | tcgctgaagt ctctctggga ctttttaaaa gttgatatgg atgctggtta agcacctcat |
| 3901 | tggttaaact ctactagacg tctgcatgga gactttcaag gcagtgcccg actaaggctg |
| 3961 | cccagaaagt aaggtttaac tttgaccttt ggaatacatc gcatgatgtt ttccagactg |
| 4021 | acttactgcc taattgggtt caagtagcct gatattaact ccagtttatg caagcctacc |
| 4081 | agggatccag gggcagaaaa ttgagcatga gttccctata gtcatggtca gtactgtttt |
| 4141 | gttactggat tcccgttctt gatggtagtg ttgagcctga ggggttcaca gtgaagctgg |
| 4201 | gtagtggaac catgcaggcc tgagtttgaa tgcttcctgc cacaaaagat aagttaacct |
| 4261 | gcctctttga tccttgattt cctcgcttgt aaaatgggac taataatctc atttaatgag |
| 4321 | tcagtgacaa aaccggcctg atctgtccct cgggtgctca gtgtgtgata gtgttattct |
| 4381 | cagagagata ttggagtgtg atgaggcaca actttgagct tttctagggt ttagagaaaa |
| 4441 | acaacaatag ctggtgctta tatagtaccc atgctatgcc tggggcagtt gtaagtggat |
| 4501 | tacacaaatc aattaatttg gtccccacag cagcactgtg aggcaggtac tcctattatc |
| 4561 | cttatatcac acataggaga ttgaggcata aagatgttat cacaggcagt ctgcatactc |
| 4621 | aacctgcact ctttactgcc tcccctgaag cccccttatt tgtaatatac ggtgggaaag |
| 4681 | agctttttct ttggctttaa aatggagcca ccttatgaga gagaagcctg ggtagcctct |
| 4741 | gggttgaaga tactgaggta ggtggtcagg atcagagact ctgtggattg cggttttaag |
| 4801 | ggggaagcca tattacactt tcctactttg ggttagcaca acacatctgg ttaggctgaa |
| 4861 | atgaatctgg ccttttaggt gtcgggggac acattttgag taatgagaag ataagcagga |
| 4921 | gccactcagt ggtgtgtatg ggatcatgca tgtaatgtgt tttccacttt catcagtctc |
| 4981 | catctacaga ccaaaagctg aacagaattg gcatgtcctt agtttctagg acctagttta |
| 5041 | ccaataacac tttatggatc atctcactta atcctccccc aactcctcaa gggtaggcca |
| 5101 | ggcaaggcta tgtcgtctcg gttgcagggg tgaatcatcc aggttgggag agaaggtcag |
| 5161 | acagccagta ctcttcactg ttgggttccc ccattgtaaa acagtaggga ctttgaaaat |
| 5221 | tggatagact atattgggtc ctcagtggcc tcttaccaga atcacctggg aagcatgtag |
| 5281 | aatgcaggtt cctggctcca ctgctaggca ttggtttagt actggcattg ccaaattttg |
| 5341 | ggtgagctgc ctgtttttgt atcatgagct aagaataatt aattagtacg tgtaaacatt |
| 5401 | gcaatcaatt tgatgatgtg gaacactttg aatcccaatt aagtgaaatg ttattatccc |
| 5461 | ccttccccct gcaaagaatt cttatctcct tagaccttta ttaccaaaaa aattgtactt |
| 5521 | attatatatt ttgtatttta tcaataattg tagaaatgtg ttttcttaca ataaaaaaag |
| 5581 | tgcctatgta gtactgtcaa tattacctct aggtaaagtt tactgtttgg ctctttacag |
| 5641 | aagtttgata atctctggtt tagtagattg tggggaagga ctttgggatc tgggttttta |
| 5701 | tttttatttt atatttttat ctttttaggg atgcaccctc tgcatatgga gattcccagg |
| 5761 | ctaggggtcg aatcagagct atagctgcca gcctacacca cagccacagc aacaccaggt |
| 5821 | ctgagccatg tctgcaacct acaccacagc tcacagcaat gctggatcct tatgccactg |
| 5881 | agcaaggcca gggatcaaag ctgcatcctc atggatacta gtcatattca tttttgctga |
| 5941 | gccatgatgg gaactcccta aatttttttt tttaattgtt aaaatttttt aaagcatgtg |
| 6001 | acaagccttt ctttttggtg gtgcttaaag ggggtctttc caaggccttt tacatgtgcc |
| 6061 | ctttctctag ttgatatgta gtggaaattg gcttcaatcc atgaacatcc ataagaagag |
| 6121 | aagtagtact tactgctggt gtaaaattga gcattccttc tattcagaag ttattctctg |
| 6181 | taaccaatgg aaatttttta tctttcatat tcaaaatatt tcaaaaggct tttgtatatc |
| 6241 | ttgtagttaa atggttaccc ttaagattta gatgtcttca aaactagagg gaaggacttt |
| 6301 | gaactgcaac agtttgagct ttgaggtcca gaaggtgcag tagctgtgta cctggtgact |
| 6361 | gacatcagac tctcagagca cagaccattg aaaacctgcg gataatcctg gaatctctag |
| 6421 | tttgggcctg ctcctcttcc accagggcat attgcctggg gaatgtacca agagtaatgt |
| 6481 | ggctttgagt tccagagccc ttctttcaac ttctagtctc ttgtgcctga gctaatgagt |
| 6541 | ggaagaaata gatgtacgat tggcctggcc aggaaggagg caataaatct aaggggagca |
| 6601 | ggcccagtca ccataactgt ggcctgtact ttacagcaaa ccacagaccc agttccctct |
| 6661 | ctgggctgct gctgcacctc cagcctctca agatgactta ctctagactt aaacaagcct |
| 6721 | ccttatttgt aatagaggca cctgattgag ctatgggggc tggttgtcca gaacttcgtt |
| 6781 | ttgtattaat tataccatat tgaaataaaa atctcagggc tgttggtaat cctttatgga |
| 6841 | atttgtgtag gatgcttatc agatatctcc ttactagtgt gcctgccctc tctaccttgg |
| 6901 | tgtatcactt aggaaaggag cagaaagctt gttgctgagt ggacatgagc tctggtcgaa |
| 6961 | tgagcttggc ccagttgttt ggcctgaaat ctaacttggt gaagaggagg ctcattactc |
| 7021 | tggtgtccag agggggtact cccttacaga tgccatgccc tcctgccctg gacacacatt |
| 7081 | ttgccctgtc taccctctgc tctagctagt gctctagtct cctaagaagt accttccatc |
| 7141 | aatctcattc accaccacct tcctcccaca gacagttgga gaaataggga cctgagtctg |
| 7201 | aatcttatat tacattgaac tataattata tgacaaatga taaataaccc aacaaggatg |
| 7261 | ttttcattaa agagatggag tctggcaggg atggaaactt gtgagggcat ctgttattca |
| 7321 | gaacttctca tttagtaaaa tggtgatgag caaagcaccc ctagccctgc agtctcccag |
| 7381 | catagaacca gttgtcctga taacatttgt taatgagata agatgtcttt gtccccctgc |
| 7441 | accaggtccc atccagtgcc tacagggcca caccctgcat cccctgtgtt tccactcaaa |
| 7501 | tttattttct ttcagctctg cagctgccct ggtgcactca tctagtgcct tttttaccaa |
| 7561 | aacttgctcc aggcagcaga tctaaaagat cagtttactt accccactat catttactct |
| 7621 | aatgtggatt aaagtttggg ctgtctttcc catagggatt tacatttgga gattccggtt |
| 7681 | tggtgaggaa attaccagag agctattaga cacttgggtg ctgttctcag ctttgtgatt |
| 7741 | aacacacttg gacatgttgt ttggcctctt tgggcctctg tttactctaa aatgagagcg |
| 7801 | ttgaatgaga tcagtgactt tcaaactttt cgttcctata gtaagatcta tgttttacat |
| 7861 | gactacccag tatgtataaa catacacaca caggttatct cagaaactga caatgtgctc |
| 7921 | ccttattttg ggtaaaacac ttttcattaa cagaagtgtt ctggctttga cccatgaatc |
| 7981 | gatttcatta cttgttaatg tttgaaagac attaaaagat gaatattaag attcccacac |
| 8041 | tcagatattt tgtggtttgt tttcggggaa tgagggaatg ccatttgctg ttttgtgaaa |
| 8101 | tcgttccacc aagggtcagt agtgattcct ccaagtttcc ttgctgtgcg agtggccctc |
| 8161 | taccaagcat gttcttccac cccctctcta ctctcgtcac ccgctgctgc cctcatcact |
| 8221 | cagtgcactg cactgggagc cccgacattt tccaacgcgg gaaagagagg gttgggcagg |
| 8281 | gggaggtctt tggccttggc ctcctcggac tgcctgggtg tgctccttct cattggcgct |
| 8341 | gtaaaatgat gatgtaatag tgcctataac acagtctggc acacagtaag cactcaataa |
| 8401 | atgttagatg tcattgttat gttctgccag aacaccattg ttggcattca ctttaacaaa |
| 8461 | aaaaaaagct tatgttatgg atagacacgt tgtatcaaaa agtaacattt gtttcaatgg |
| 8521 | aaaaagaggt tagaagctag agtttcaaac atggcagagg ttgttttttc cccacaagca |
| 8581 | attcaacagg aatgggtggc atctgagtgt agctatagca tctaaacatc atggagcagc |
| 8641 | cccagcacca gattccaagt cgtttctgct gagggtaata tcacaattca tccttttcct |
| 8701 | gggcagcgca ttgtcactac ttcagccact atttcttcag tctctactcc tcttgactgc |
| 8761 | ccagccaccc tccacccctc cttcccagcc agcaaccttc ccttcacaga gaaaatggac |
| 8821 | atctcttggt ttcctaagaa attcccggac aaaacccatg cccagctcag ctgtcctttg |
| 8881 | agtcttacct cttttgccct tcagttatct ttttccttct gggcacctag ctgctctcct |
| 8941 | ttgggtcctt ctcaagcttg ggatgttttt cccatcttaa agcaagtagg aagattctct |
| 9001 | tgatcgtctc tttagctact gggtatctct tgctttcctt tttattttta tttttatttt |
| 9061 | tttaaattgt tcttgccttt tagtgccaca cctgcagcaa gggaagttcc caggctaggg |
| 9121 | gtctaattgg aactgcagct gctggcctac accacagctt atggcaacac cagatcccca |
| 9181 | ccgactgaac gaggccaggg attgaaccca catcctcatg gatgctagtt ggatttgttt |
| 9241 | ctgctgtgcc acaacgggaa cttctctttt tccttttatg ttcaaacttc ctgaagtgtc |
| 9301 | tgactgtaac ttcctgctga cttctcttac acctcagcct cctcagtcca attcctgaac |
| 9361 | tgctccccaa atcccaatag cctttattgt cttttacatg actccttagc agcccttgac |
| 9421 | cttcctaccc ttgaccttca tgaggtgtgt tccctagtac tgctcccttt ctctggtgag |
| 9481 | ctctcctaca gccttggcaa ctcctcagtt tccggggtcc ttttgctctc cctcctgcag |
| 9541 | ctgtgaagta ttggactcgg tcaagcgcag tctctgaatg ctctcttctg tattccctcc |
| 9601 | ctacagactc ttcttcttcc tcactgacag ctgcaggtgc tatgtgctgc ctggggtctg |
| 9661 | atgtttacac ctccagcctg acctcttggc taagcccagg atgcacctgt ctcaacccta |
| 9721 | atgtccccag agtcggcatg tccaaagggc tgcacacagc ccccttgaag ccttgcttca |
| 9781 | gacttcaacc agaatgatct taccacaatg tgagtgtaat tgtgtcgctt tgtgcttaaa |
| 9841 | atacaccatt gtccttagga taaagtccag aagccttaat aagaacaact aggatttttc |
| 9901 | atggactgcc tctttttttc ctcaccccct tcccactgca ctggcctcac tcaccagcat |
| 9961 | tgatgctctc gaatccattc tatgcttgaa ctgccaccat catgtcctta acatctaatc |
| 10021 | atctttacca tctccttcat cctccacccc tcctctagct ctaggtctca tttttttatt |
| 10081 | ctaaaacact tatagacatt tccttcaaag agcttcagtt tgtaattaga tattcctgca |
| 10141 | tgtgagtgtt ggaaatagca ttgctgtccc cacgtagccc ataggctgca tgattgaggg |
| 10201 | ggcctatttg ggctcagcac tgcacttggc atgtgtcggg cattgtagaa gtattggttg |
| 10261 | agtgaaggag ccatggtctt tgcacgttct tgtcattttc atcacccatg gtctggtgag |
| 10321 | ccaggcacaa agccactgaa acaaagcatc cactgaggtt tggtgtcctc agctttccct |
| 10381 | tgggtcggtg tgagctcccg catcctgatt cacactttct cagcccagtg gttttcacat |
| 10441 | ttttctgggt tttatatccc atgtcagtaa aaatgtgaac ctgagcccca gccctaatat |
| 10501 | gtctaccttt tagttacagg tgactcacat acacttcatg taaatatgca tattgtgaaa |
| 10561 | cataacaaaa ttaaaaagat aagttaaaaa atattaaacg tctgagtatt tttttcctgc |
| 10621 | accagtctat tgtctggggg ccatccactt gggagaccac actcctccag tcaattgcct |
| 10681 | gtgttatttt taatttggtt atgaaagttc atgccatgta agaaatgcct gggccttatc |
| 10741 | aagctctcct tccttattaa gatcttccca accctggtgt tgatgggtag gagtggagcg |
| 10801 | cattcctcac ccttctttga taagcaggga aaatccgggt ctgcccgaga ctcccagcaa |
| 10861 | atcaagtgtc cgctgctgcc tgtcagctgg gtgctgcctg gtcaggctgt gtgcacagac |
| 10921 | acacccaagc tccctcaggt cgtctcttaa gatccagtaa ggctagcccc tgggctactc |
| 10981 | ctgcagatgc ttggaaaggc ccagaagtaa tcaggtgaga ggatcccatg ggccgcggac |
| 11041 | ttgggcgagt cagggaaggg ggaggaggtg ctctcctatt atcctgcagg ctggaaatct |
| 11101 | gtcagaggca ggatctgtgc aggctagaag ggcaggagtt gatcaccaca gggaaacctg |
| 11161 | gagaagacag gcccgccggt gtttctatgg gggcacttca gaaagttgtg ctgagtctct |
| 11221 | acagtcagaa gtggccagaa gctctggatc ggtggattct gctacctttt gccaagggca |
| 11281 | tgagtgagag agtgagtgag ctgggagtgg attgctgggg gagagactca ttctacataa |
| 11341 | ccaactttcc cctgagctat tgcctcacca acaggccggg tgctggggct gtggtgggag |
| 11401 | ggtgagggga gcccactttc acctgtgagc acaacattag gaatgttctg taagtatccg |
| 11461 | tgtagcaggt agaatttatt gaatctcatt atctgtgctc tgggctgggg gaggtggtac |
| 11521 | gcatatgggg ggagtgggtt acagaaagct ggcatttcca gtttctgtag cagagttggg |
| 11581 | gaggtatagc taacacggca cttaggcagg aggaaaggtg tgtggttggt aaggcagatt |
| 11641 | tcaaccccag ctgtgcatca gaacccacca ggggagcatt ttaagaaatt cccaggctct |
| 11701 | acccaaccac caagtcagtc tcccaaggtg gtgcccagtc tctttttaga atgctctaaa |
| 11761 | gtgagctcta aagcatggct gggtgccgcc acattgagtc agggtgcaga acttcacagc |
| 11821 | aggtaggaag aagtaaacca aatggatgta agagagagga aaatggagca aggaaaacag |
| 11881 | caaagaggaa agcaggtgca ggatttaacc tgctggggtg ctgggacccg gttcttagcc |
| 11941 | tgcccatccc tgccctgccc tggccacaca gatttcacat gtgcccgcat tcctgctcat |
| 12001 | cacatttgtg attttttgtt tactggtatc tcatgagtgc taagcgggat ttattgagta |
| 12061 | aggctggatt tgatccatcc ttggtcttca gggaactgag aggctagtgg atattttgta |
| 12121 | aaaaggaggg aacctaaggg ccatgcagtc aggggtattg ggctgtgcca ggaccccctg |
| 12181 | agccccatca cttgaggata tctggcaggt cacctttttg aacctcagct gcctgacctg |
| 12241 | taaagtggtg actaacacta atacctgttt cccaggggct gttgtcagga tggagagaaa |
| 12301 | taaggtttat cccaggtatg gactgtggac agcccctgaa gcttagtaga ttctgaccag |
| 12361 | cctaggcttg attgagctgt tggaatggtg tagacagccc tactgaggaa ggcccttgct |
| 12421 | cactatctga gcttgtgtgt ggcgggagta cttaggaggg ctcacttgga gctgctcagg |
| 12481 | tgggtgggcg agggcaagaa gggccccagg cttcttgttg aggtggagct ggagcaacat |
| 12541 | cagccaagca cagaggtccc ctgctctagc acccctgccc atcaggagtt aggggctgtc |
| 12601 | tgcctgtctt gctctgtacc agtagtacca cttgcctctc aactccctcc tggctgcaga |
| 12661 | actctaggtc tgcccctctc aagcctttgt ctttcatcca aatggctcct gagaagtttc |
| 12721 | ccccaggaag tcttccttga ctcactagaa taatgggaac aaattatgtc catcccaggt |
| 12781 | gatgtcaaga tgtaagatcc tgggacttcc gggtcacaca gtagtgttct ctctcctgac |
| 12841 | actggggtca cctccttgga gtgtgcatca tggcccctct ttcccttggc ttggtcagtg |
| 12901 | tctctttaat cccctcgcca gagggcctcg ctgagtgttc ccagagccca ggacagctcc |
| 12961 | cctgcagctg ggtgcatcag gaaggctctg taatgatgtc atgtggcctc cagcctcccg |
| 13021 | cctggcggcc agtgggaagg atctgtctgt tctggcacag gggccgcttc catatggagg |
| 13081 | gccaggaact ggccatcaca gtcaccgggg cgttccttcc attgctgcat gtttcccctc |
| 13141 | ccctctggaa gctctcaggc gtacccctgt gcaacccagg gagagtgggc aggcgtggac |
| 13201 | tggagtaaag ctccccagct gtctgggagg cctgaagaaa cctctgcaga ggttggcctg |
| 13261 | ctgccataat gagtggttct cctctgagct cccatctagc ttgtggctct gttgcagaca |
| 13321 | agcctttgtg tgtcttggat gagagagctg gtgttttttt acgctgaggt atggtttctg |
| 13381 | agtctgggga ggcttctagt gtagggccct ctgaggcctc tgtttggggt gaggtacagc |
| 13441 | agtaggcatg ggagaagaaa tggaatgttg gcttctcaaa agtgaggggt acttggttca |
| 13501 | gatacttggc ctttgtagat gttcaggtat ctttccctag ttccagtggc cagtgtggtc |
| 13561 | attgtcagaa gtggccaccc atgtgggtca gatgtgggaa tggaaaagca cctgtgaggt |
| 13621 | tgatgcatgg ccttagattc cagggaggtc tggatcctgc tttgaggtgt ccactatgcc |
| 13681 | caaaaccaga cttatattga gtgcatgcct tgctagcccc aggagtctta aaatggccac |
| 13741 | agatgtccct gatgagcagc agtgactggc tagggcctga ggttaaccag agttaggagg |
| 13801 | gtgatttctg cagatagaaa atactgcgga ggatcattca tttttacacg ttgattgaat |
| 13861 | gcctgccacg tggtgagttg tgttctgagc attctggata tagcagtgaa caggagaagg |
| 13921 | tcattatttg ggctgcccct gtggggcttc cattccatca agggaaacca ttaataagtc |
| 13981 | aatcaaaggc atgactgctg gtgtgatagg tctcatgaaa cataaagctg tgttaaaagg |
| 14041 | gactaggtgg tccaggaagg cttctctgag gaggtggcat ttgagcaaag actcgagtaa |
| 14101 | cctacactag acttctggca cccatgagcc aggacctgta gaggtaccta ggaactctct |
| 14161 | tgctgaggag caagctgagg cccagaaagg ataagacttg aattcatgag ctgattaatt |
| 14221 | ggaaagttga cctgaaacaa aagagtgaca aactgtaatg ggccagtact ccctgttttc |
| 14281 | aaccttaggc gtgtccccag gccaactgac cctctgcctt ttcgtcccag aatgtccttt |
| 14341 | attatcctct tgagacttag ctttttaaag atttgtactt ccaaattgtg tttattaaca |
| 14401 | atggtaggtt taccttctca tttgtggctg agtacgttga ggagagtggg gagcagaaac |
| 14461 | acatctgtaa ccgccagtca tccccccagg caagggctca gcacctggaa ctggccttgt |
| 14521 | tcctgtctca gcagagatgt ggcccagttt gggtaaccac aggctctcgc tgcctggcac |
| 14581 | agtgggattt ccatctgtcc ttctgaaata gtttcttgac tgctactttt tgggttccat |
| 14641 | ttggatcctt caggccctct cacctggttt gaggggccag atgctttggg tgagcaaagg |
| 14701 | agatcctgct gaaacctctg atgaagggtg gtgaggccgg gcttggaggc cctagggctt |
| 14761 | attttaaggg gagaaatcca cagtcaggtc acaaatccag ccatgaccca cctctcccaa |
| 14821 | ggaccgggat gagccttaat tggctgagag ttttcatcta aaagcaggca tcttgcatga |
| 14881 | atatgaaagg agcttctgat gaagtaagac ttcattaatc agcctgttag gaatctggct |
| 14941 | tcccagtatt atgggggctg gataatttga tgcttactgt tgtgctttca gcttataaag |
| 15001 | ggaaggcact agattttcat ctttctgcta aatattgaga gaaaatagta tctttatgtg |
| 15061 | ctttgtttgt ttttaactgt tgagtatctg ggtgccagac accatattta ttcttactta |
| 15121 | atctgtatag aaagactaca gaatgaatgg gattattccc actttcgtag atgaggctca |
| 15181 | gaaagctagt gaagtgtcta gctcaaggtc atatagtact gtggagcagt gctgggtaca |
| 15241 | aagccaggcc actggcttca caccttaact ttgacctctt acctcctccc agccacttta |
| 15301 | gggctgctgc taatatggaa ataataactt cagactccta actttcattt ctttctcttc |
| 15361 | tctgttaaaa tctgctgcat ttgttccccc aagaaagtga aacagatgat actagaactt |
| 15421 | gtgactttta aaactgtttt attgtgaaat agaatacatt gtaaatgtga ggttcagtga |
| 15481 | cttttctcct ttagattttt tttccccttt aaatgattct tttacactat cagggaaatc |
| 15541 | ccagcaaaat caactttcca tatgcctgtc ctgacctttc tgtgccaggg tcttaatata |
| 15601 | tgtgtgtctg ggtttccact gacagctcta atatacttca aacatgaggg cttgtgcatg |
| 15661 | ccaatgagaa agtacttagg atacctcaaa gtgtgaaaga gggtctggaa agtgggagga |
| 15721 | agtccaaatc gtcctccaat aaaagttgcc taagacaact tggggcttag gtgctacttc |
| 15781 | aaaaactaac aatgcattcc acctttccca aggggaagtg ttgtgaatgg gcatggcagt |
| 15841 | gccgtgtttc ttgccctttg ttgagcacct gctccaagcc ttgcttcatg ctaggttttt |
| 15901 | ggcaagcatc acatttgaat cctttagaat gcccctagga tacaggtgtg accactccgt |
| 15961 | taccagatag agacacaggt ccacagaggt cagatggcct tcaggacaca ctgaacttgc |
| 16021 | ccctgtgtgc tgtagcagtc ccttctgctt gtccatccca gactggacac tttgggggct |
| 16081 | gaaggcaagg atacctttat tgttggagcc tggcgcagtg cctggcattc ataggttcta |
| 16141 | agtcatagca ttgaatggac ggaggtgagt taacttgtcc acataggtat agtggtgagc |
| 16201 | acattagatt gtggaactcc aggtctctat gactgttgcc cagcaggtca gaagtggggt |
| 16261 | ctgattctag ctctttggtt gaatgcaaaa tggcatatgt gctggcttat ggacattgca |
| 16321 | gcattgttat agcagaagac tggaaataac ccaaatactc atcaatcagg ggctagttaa |
| 16381 | gaaaaatggt ggtgcatgta caccatgaaa cagtgcaaat tagaaacaag gaaggttttt |
| 16441 | atgtactata tattacacaa acttcatgaa aaaaaaggta aagaacaata tataatatac |
| 16501 | taatttggga taaaagagaa aataagattc taaatttgct tgtgtatgtg taaacaaact |
| 16561 | ctgggaggat ttttaatggg tgggatagtt aactggatag ggtgggagag agaattaact |
| 16621 | gtatgttttc ttaagttttt tggttttgaa accatgagaa tgactgtatt gcttattcaa |
| 16681 | aaagttaaaa agataaaaat aatggaggtg accttggact agctattctc tgtatctggg |
| 16741 | cttcagtgga ttagatcagg ccttcatctg gagtggcatg ttgtgtatct attgtgtata |
| 16801 | ttgtgtctct ctggctttca tgagctcttc cggaagctgc tgcccctgtc ctaggatggt |
| 16861 | ctgtagtccc ttcttccatt ggtggcctgc acctgaatca tcagctcaga gtgtttgaga |
| 16921 | aagactgggg tgacccagag agccagaggc cttctgcaga ggtgtcaggc cttgttcctg |
| 16981 | tctccaggcc tgggacttta tcctctgaac accctgccct gatgtgactc aggtggttct |
| 17041 | tcccctaaag tgaaggatta cagagactgt tctggagcat tctggcaaag tgtgctgcag |
| 17101 | tttaatggga agaaagaaat ggcagaatgt tttcccaggt tatttttaat gcttttcagt |
| 17161 | tcagcaaaca tttactgcga actaagtgca aggcagtgtg ggggactctg agctacataa |
| 17221 | cacctcctct gctctctggg gcgccaagtt tcgggtaaga aacttgttcg taaaattcct |
| 17281 | ccctgtgccc tccaggacag cacggtttgc ctctagtccc gcagagtttt gtgggattgg |
| 17341 | taggaatcct tctccccatt ttacagatga ggaaagtaag tctcagtgaa gctttgccca |
| 17401 | aagctgcagt tcctaagtgt taaaacctgg aaccgacaaa aaaagacaca cacaaaaaaa |
| 17461 | cctggaacca aaccacactt tctgatggtg tctcgtgtgc ccagacaccc atgagtaaaa |
| 17521 | ctttctgcca aaggatattc cccaggggtg caggcaaggc ctgtttctac ctggaaacat |
| 17581 | tgggtgagca cagtcctgaa taaagctcct tttttccttt aaggaagggc aagagaaatc |
| 17641 | acaggcttat gcctgggtct tggatctgaa cccctttgct gtggtccaaa cagttctgac |
| 17701 | ttccactgct tgtgaagccc atcactctgg caccaggtac atgattctag aacatcccat |
| 17761 | aggtgtgtac aagtgcgtgt gacagacagt gggcttctcc ccatctcatt ctcacattat |
| 17821 | cactctgttt ccttcccttc cacaaattcc gtcaccagta cccatcgtcc tggctgatcc |
| 17881 | ccaaaaggac caagcatgct gcctgctcag ggtctttgcc ctcggtgttc cctctgccct |
| 17941 | cttcacttgg cttcaagtcc tcactgaaag ctcagcttag aaaggccttc cccaggatct |
| 18001 | tttgtgaagt actgtctttt gtcacgattt cattttttcc cctctgtccc tttgttgcat |
| 18061 | ttatatgtat cgtacataga tatctatact tactggctta ttatctcttc cccactagat |
| 18121 | tgtaaaccca cgggttaggt gcctgttttt gttcattgct gtttctgttt cctagcacag |
| 18181 | gtgcccagct tttgacagat actctgtaaa cattgttgaa tgaataaatc aggcctgtgg |
| 18241 | cctaaacaca taatgcttct ttaaagaggg aaagcatcaa atcatagcat tttaagagga |
| 18301 | ggaaagatcc aaggctcatc tctttgcagg gcttcatcat acaatattat taattcattt |
| 18361 | aataattgtt cagtactgtt catgtggaaa gttctttgca gaagtcactg agcagcctct |
| 18421 | gatgcataca cttacaggga caggggctca ctgatttgtc agagcagccc attctttggt |
| 18481 | gggacaagct gcaaagattt gaacaccctc ttatgtttta tgttggtcca aaaactgcct |
| 18541 | atttgtaatt cctgcacact gaccttagct cttgagctgc tggagaacac agaataaatg |
| 18601 | tactctgttt gcatacagct ctccttccaa tagtcggaga aagatagcta tcatgagttc |
| 18661 | ccccaccctc cagcctaaac atcactagtt ccttccattg ttcttccagt gttacggttt |
| 18721 | gcagatgcct tcctaccctt ggtgcctgcc tcaagtttgt tctgcttcgg gtgtcagaat |
| 18781 | ttaaggtctg gacccatcag aacagtgttt tgggaccctg accgaggacg cttggtccat |
| 18841 | ctcacttgtt tctgtccaca cagcctgtgt tggccatctt ggcagggatc tccttcatga |
| 18901 | gcttttgatg aaggctaact aaaatctcta ggctcttttt ttacattatg tctattcgtc |
| 18961 | tagcccctcc ctgactcagc aagaatcgta aaggtttggg ggttttgttt tgtctttgtt |
| 19021 | tttagcatct tgagattaaa gcagctgtag atctgtgaac agcaaagaat gcaacccgtg |
| 19081 | ctcgatttca caaaccagta aatataggta aagttctctc accaactctg gaagtacaga |
| 19141 | aaaacccact gagcctctaa ctttcttgct tctgccctct ttttgatgcc tgtgtccttt |
| 19201 | tcacagagtc tttctgtagc ttactctccc tcggtgttcc gtccctctcc cctccttcct |
| 19261 | tcctggctct cattccattg ccccgtttct cccttccagt tagtagtgta tggaattaac |
| 19321 | attactcctt agcatttcct gcacttccat ccccagtact tttaccttca tttccagact |
| 19381 | atggcaagct gcacatcaca tttctctaag gcagaaagag atgaaattgc ttcttatgtg |
| 19441 | tgacccttgg ctaatttgtt ttgtggtctt ggatagagaa aaaaaactta cagccctcag |
| 19501 | ccttaggttc ttttgcatga ttggttcaca tttctgccca aatcagcggt ttccagttgg |
| 19561 | tggttggaca caagggcctc agcaccgcgg tgtttgctct gcttctgtca ttgccaatgc |
| 19621 | tgctgtcatt ttggtagagg tggcagggaa ggaggccaag gtcgagggtt tcttctctga |
| 19681 | gccacttagc ctttccccgc ctcttctgcc ctcccagccc tcctgggcag tgtggggagg |
| 19741 | caggcaggaa ggcgggaggg ctggggtcag gcccggggct cttttcctaa cagctgtgtt |
| 19801 | ctttttcctc ttttgtttcc tcttgcttca aggagttcac cgtggagagg cctgtcatgc |
| 19861 | tggggtgtag accccaagtt aggaggatta agactggccc caggttaggt tctacattgg |
| 19921 | gctaaactgt gtgaccttgg gtgaggagct ggattgaatc cagtggttcc ccagaggtgg |
| 19981 | cgatgatggt gtcctttagt ttctgaagca catttctata gccagctgga aattcggcag |
| 20041 | aggcccgtac tagcctgcca gaagtgtcct gtcctgaatc tgaatggcct ggtgtctttt |
| 20101 | taaatgggct atgttgctag gctgggaagg ggctgtgatc tgctggctca tgatcgctac |
| 20161 | atggtgatgc cacggaaatt aattaacttt tgttgtgcaa accattcttc cacttggtcc |
| 20221 | atggggagtg gatggctgtc tccatccaca ccagacccac cacagaaact ctgagctatg |
| 20281 | tccccttttc acaccttgct gactcgactc cggtaggatt tccacaagtg gtcccagccc |
| 20341 | agctgggctt aaatccctga aattaatttc aggagtcaaa atcagccaaa aatcaggcag |
| 20401 | ctgagacaga gggccaggaa gccattttcg catctttttg tgtattttcc caagagtaga |
| 20461 | gttggggtgc tttgcttcaa aaatgaataa ggggtcagag ccattgctct ccccaactcc |
| 20521 | atcctttctt ctagggtgag tgagctggtt cagtttgacc acttagccag cccctctggg |
| 20581 | cagggcacca gaaggggata ccaagatctc agaccttacc aaggccgtgt ctgggggaga |
| 20641 | gactgtgagg aaagactgac aggtgtcttg tggccaagca gcagctctct gggtgccctg |
| 20701 | gtgggggaca gggtgtgttc cctggggagg gatgggagga gtggaattcc acttggcttt |
| 20761 | gggttcaagg aagtgaggcc tggggaagca cttcataaac gattaacaca gggaggaaat |
| 20821 | gccaggtggt gtgaagtgtg tgctgccagt cacgggcaaa ggggtggtgc aggaacaggc |
| 20881 | ttgaaaagag acatggggat ttagtcaggg ggcattgatg gtcagggggc tgggagtcct |
| 20941 | cctctggatt tggcgcctga tccccatgcc gtttaaaggc ttttggacag agagcgacta |
| 21001 | gacatgatgt gatgtgatcg aagcagtgtt ttaggaaggt ggcccaggat gtaccctctc |
| 21061 | cgctctctgg gccttcctca tcaagctcct tggggctctt ctgttgtgtg gggccaatgc |
| 21121 | ggtggctcct agatcatcgt gggtggtgtg ggtcttttta tgaaccacag gatcatagag |
| 21181 | cagtcattag gaccccatga gtccacgtgc ctactccctg ctgtcctgta gggtgatagg |
| 21241 | catcacatgg ggcaaggcca gatgcccata tttgaaacca gcaccttgag cacagggggc |
| 21301 | tgtttttatg atcctggtgt gttttaagag actacatgat tgactttcgc atttcggtaa |
| 21361 | ttatccggga taattgccca gcgtcctaga tttcctttct agcatccttc aaccatgact |
| 21421 | cctgggctcc tctggcctct gaagtccccc accttctgtt gaggaacata actgagtttg |
| 21481 | gatgtgggac gggactaaaa gtggatgggc ccagtgaatt ttggaactaa aagggatctc |
| 21541 | gtgtctgtgc tccattgttt agtgtgtgga ttagaggact gcagaagccc agagagtgga |
| 21601 | tgttacttcc cccagggcac actgcaagtc agtggcaaag tggggcccag agtccaggtc |
| 21661 | gttagactgc ctgatgagca tcctttgcac cacacctcca tgtttcttgt ccccctttcc |
| 21721 | ccggccaccg ttcagacacc acctgctggt aactgtgcct tcactggact ctgcttccac |
| 21781 | ctcctgcttc ttcacgcctt ccattacctg ctgaaggtag cacaggacag ccacttagaa |
| 21841 | gcagcctgct tcacttgatc atgtcattca tgcaccagtt ccagaaccct catctcttcc |
| 21901 | tgtccccgtt gcacttcctt tcccccagac agccttctgg gcctattctc tgctgctctg |
| 21961 | ggaatctttt acctgctctt aaatcaggca gggctagggc aggagctggg caatcaggga |
| 22021 | aggcttcctg gaggtggaac tgccaagtgt ctgaagtaga atagaatcta gactggctgg |
| 22081 | aagagaggaa cgaggtttga ggggaggaga gcaaaggcat gacatgaggg aggggcccaa |
| 22141 | gctctgccag gctcactggc taaacaggcc catctgacaa gcccaaagcc caggtccgac |
| 22201 | agcaattgca ccagttcttg agttactgag tctgttctac tggccagatg aagcatctgc |
| 22261 | agtggaacca gctcctctgt cttggtgagg cagaaaccaa gtcctcctca agcttggggg |
| 22321 | aggaggtagg aagccggttc caggcagcga gggagccagt cacagggttt atgttaatac |
| 22381 | gggccctccc ccagccggcg cttagcctat tacccgggcc ctgccgacag cttaattacc |
| 22441 | gctgcagcga gcctcggcct gccctccacg gttccctaaa ataataagga tggcgtcacc |
| 22501 | gacttcccgc ggccatgtgc tcccacccgt gccttcatag ctctattgtg ggaaacaaac |
| 22561 | aaaatccaga gatccagatg cttttttctt ggagattttt tttggggagc agggttaaag |
| 22621 | taaggtggga ccctgccccg tagttaagat ttcaaaagat ctctaatagg tatggagacc |
| 22681 | tgagtcttag ctccactgag gttgcagaat aacctcctgt tagcagaaac gaaaaagctg |
| 22741 | tgtggttgat tctgtggtcc tccaccgggg actgtgattt ctgattagag cagtggtgtg |
| 22801 | gtgctgtgca gtgtggtgta gcagagaatc acctatctcg gggttcctgg gctctaggcc |
| 22861 | aactctggac cttgtttctt cctctagcaa aagagagctg aactagacca gcaatttgca |
| 22921 | cactgtgggt cacacttgtt aaaaaatcat cttttttaat gtaatagaaa aaagtaattg |
| 22981 | taacagggct aagttttgtt tcagtgtgta tgcctgttta catgcaaaaa tgtgcttact |
| 23041 | gagccaaggt gtaaatgtat ttattttttt gactgtgggc tatggtcaga gagccactga |
| 23101 | cctagatgat cccgaaggcc tttctagctt tcataatgtc cagattttct cccagacttg |
| 23161 | ttccctatgg aacctgacag gatttttcag ttttgccaca ctgactccta agcaaaacta |
| 23221 | gagattgtat ggttaaaact acaaaaccac aagcatctat ccctcctatc gaacacctgg |
| 23281 | gaggaagccc atctccccct gcattggtgt ctcagacagt ttggccttca agctagaaat |
| 23341 | gggatctgca acaggggatg gcccatttaa aaactgacct atttaaaacc catgagcact |
| 23401 | gaaaaaacac ggggtcaatc tgatttaagt tgtcttcttt tgcgaagctg ggacctgaaa |
| 23461 | gctaaattgg tcggggactg acaaggttga aaccaaagtt acaaatattt attgcattct |
| 23521 | tgttcagtga aagaaaagat caagcctcaa gtttagtgga aaaaactaca caaaaggagg |
| 23581 | tgtgggtgta aagtccagca gggtgcattc tgggcacacc atcttcactc tccagaatgt |
| 23641 | ggagaggcct tcattccatg aagaagctct gcagacagcg gaggtgactc agagctgtgg |
| 23701 | gcctgccttg gttcccattc ttgtgccttg actgcagacg cagcagtgaa ggtggctgtg |
| 23761 | cattgagaag gcaggtggct ttttccaagg tgggggtgct ctaagtgcac tgtttaattt |
| 23821 | aatccaaccc caggtgatgg gcactatggt cattggagga agcggaagct tcagaggtga |
| 23881 | gatgagcttg cagtggggaa tttgggcttg agccagatct gtctgactcc agagcctgcc |
| 23941 | ttctgtccac ctctccacct tgcctcagca agtgctggaa aaataaaaag cagtcttctc |
| 24001 | ttcagtttcc ttctctctgg tgctggtctt ccgagggctc tgctttaggc ccatgctgtc |
| 24061 | catttaaatc ggggctagcg tcacgggcat gtgacctgtg cagtcacaca ggcccacacc |
| 24121 | tagcgggtcc ctccctgctc ttgggtttaa catgctactg tccctgtctt ggaattcttt |
| 24181 | atcgtccttg agcaggtggt ctcacatttg cattttgcac tgggccctgc aagttacctg |
| 24241 | tccaactctg gctttgctgt aaggcacccc ttttcttggt ctttctgggg ccctcctatc |
| 24301 | tgcccggaac gttcccatcc tccccaggta gaggcatgtg aagcacaccc cccaccccag |
| 24361 | ccttgggcct gctatctggc acactggact gtagttgttt accagctgtc tgtctctttc |
| 24421 | ttgcctgcca ccaccccact tgctggcaag gaccccaact gtggctcacc gtcacctctg |
| 24481 | tgtctcccct cagctgctca gatggacagt gtcacaggag ctcactgtgt gaagagaggg |
| 24541 | gtttctcaca cacgagacct gtgtgcagag agcactgggt caggtcaaga ggaggacgca |
| 24601 | ctgctgacct gcctccttat gggattatgc ttgtctcagg gacacagaac acaccagaag |
| 24661 | tagtagttgt ttttgtttgt aaaaaaggga gggcttgttc aacctgtttt ggaccagttg |
| 24721 | cactgaaagt ttcactggtg gtttgtctcc ctctgtatgc tgggcaccta atgttgtggc |
| 24781 | tggcacaata aagaggacat ttgttaagga gttgatgggt gtccactccc cgctaggctg |
| 24841 | attacagaga aggacagtcc ctgacctcta ggaggatcgg atgcttaata catgattaaa |
| 24901 | tgattcatgc agcagctgcc cttggtgccc cgggatgcgc agagctggct gcagaaggct |
| 24961 | ttctggggag ggggcttaac tagagctaaa ggcaggggtg agaggtgggg tgtgaagaga |
| 25021 | ttggtggaca tgagggcagg tggtcaagag tgaaagacct ccttaggtcc gtttgggacc |
| 25081 | ttgatgattt ttttcccccc cggaggcaac aggaagccag gaatgttttc taggccagag |
| 25141 | tttgcacttt ataggttaca cagataccat cgtccccttt ctgtgaggca gatcctgaga |
| 25201 | cctcggggag agagtcaggg tcattcagcc agccaggcct tggcctccag gtcaaggcct |
| 25261 | gttccctctg tcatggagac cccatttgga agcagaggca gacctagggt gtcttagatg |
| 25321 | accatgacca agactgcagt gccggcagca gagaggaatg gtcaaatttg agagatcagt |
| 25381 | aaagacgaga tttcccagtt ttgaaacaag cgacgggttg ttccttagag gatagtgtgt |
| 25441 | tggtgtttat cacggacagt tcagctcccc ttgatgagaa atggctgctg tgtccttgct |
| 25501 | ttggggacac gttttgcagg aaatgccaga gccaggcagt ctgatctctt gggggctgag |
| 25561 | tacgaagatg caggcacctc tcaggtgtcc acacttgaga aatgaagcat agggtcctgt |
| 25621 | gtaggtttgt tgttgaggtg tttgaaaagc tcccgacaga ggcagaagaa ctccagttgt |
| 25681 | cggactagag agagagtaac cgcgtttgga tatttttaaa cggccagtgg aattgggaga |
| 25741 | gagtctaaaa cccaaagtac aaattttcag tttaatttta actttgcact tagctcacac |
| 25801 | ccagggtttg gcagcgggga atgggcctta cttttctttt tttctttttt ttctttttta |
| 25861 | agcagaacac accctggatg taaaagggat gttctcttca catggaagag tttggggcgg |
| 25921 | cagcaccgag cagagagggg aggaagtggg ttggaattgc agcaggattt cagagtcaat |
| 25981 | ttaaggaaga ttggggtggt tggatgtttt gaaacacatg agcctggctt gggagctgta |
| 26041 | agagagcatg gccctgtgtg gaggcaggtg gagcaggggg tggacagcag acttccacag |
| 26101 | gtcagctgtt gcactggagt tttttttttt tttttttttt tcttctattt gatccattac |
| 26161 | agacgcttca caggctgctt acctgccatc tccaatgtga cacatcaccc caaaaagcag |
| 26221 | cagtgggttt cctccgatgt ggtgtgggct ttctggtgat atcagcatcg ttggggtgta |
| 26281 | agcctcagcc catctctccc ctccttgatc tcttcccaaa ctgcgccaaa accctgccag |
| 26341 | gaaggaagtg cagaaagcgt ggtcatcctg gaggccccac agacctggga gagccacccg |
| 26401 | gcttttcaga caccaaaggc tttccctccc aagtgatgag aggtggcctc ttgctccttg |
| 26461 | gggaggagca ggcagggtct caggccccct ggcccctctc cagaactgcc ctccctctca |
| 26521 | gcagcgtcat cagagcttgg gctgagctgg ttttgtgctt tggttactga ggaagtgtaa |
| 26581 | ccagggtggg gatggctggg agtggccccc acttggctag tggaacagtt agaagagggg |
| 26641 | ctgaaggatg tgtaggtaca gtcagggcag cttgttggat tgaattgggg gggtctggaa |
| 26701 | acaatgagga acccctcctt atcctgcaac acttactgcc gccgggagtc tgaacacacc |
| 26761 | ctcctatgcc cattcctggg actttaggaa cactgagccc aatgtggcta taaaatggga |
| 26821 | gaacacccca taatacccca tggagcagtc gtgaggattg gatgagatag tgcctgtgaa |
| 26881 | gagggtgcct gctgagggcc caggaaagat cctgtggtag ctgttactat aaacagtaat |
| 26941 | ggtggcttgc atgttgtccc cgaggggagt ggccaccact ttgggcttgg tgctgggagc |
| 27001 | tgggactgga acctgtgtct gtctatagga ttctcaggca gcagcatgcc tcttcaggaa |
| 27061 | agaggccgac atccgggagg aattcccttg actccgcagc accacctttc cttgttcctg |
| 27121 | aggccttctc cttggctgat ggccatagag aagctcttga cccgtctgga aaaaccacat |
| 27181 | gtctgaaatc tttgagggtg gactggaaac ccttctcata tttttctttt atgaagctta |
| 27241 | aagaattccc agggccttcc aaggaaagga gtgactgaag acgcctaggg cgcgtgactc |
| 27301 | cagcagtgac tgcgcacaga gggggtggct ccccctcctt agtacagttg atctctctcc |
| 27361 | acttgctctg ctcccctaag gcctggcttc ctggctctac actgatttcc tgccctaggg |
| 27421 | caaaggcctc acaggattta ttcccaggca ctcttgccag tgaccttgag aaggtggcct |
| 27481 | gacctggaca tctggcctct cctggggact gagagggtgg gaaaggacat aactacccca |
| 27541 | ttccagatcc aaggggaagg tggccctggc accagtgcct aggccaagag cttgctagct |
| 27601 | tcctggcaga ttgctgctgt cccaggctga gcgggttacc cctccaccag ggaagaaagc |
| 27661 | agggcagctg tggggccctg tggccagatg cgccctgatg ttccctggtc tggtcactgg |
| 27721 | taagggtaga ctgaggaggg catggcaggc ctgctgtgga ttctgttccc caagttggcc |
| 27781 | catggtcccg tgatgcccaa ggaggagggc atcttggcag acagtcttcc tgagcccttc |
| 27841 | aggaagaagc tggtcagacc agcctgctca gaggcaggga gcagccccag acagggactg |
| 27901 | gttagaatag gcctgtctac ttatccgtga ggagaaaagg ctatgagggg caggaatgac |
| 27961 | aatgctattg agaaggacag gcctgtgcca tgtgaccagg ggtgagaaat gcaaaccggt |
| 28021 | gggtatgtgg gcatcagtac atgtttccta gaggctgcaa ggagcaggca ggtggggata |
| 28081 | ctatgtcgag caccaggtgc caccaggagg gatcaccttt aaggtccctg caggccctgg |
| 28141 | aagcccaggg agcagccccc gatcagcttg gaacaggagt ggaaaactct ggtcatccac |
| 28201 | ctggagaagc gggcaccctg gcctcccttg ctgactcccc tgggtcattt caggcctgag |
| 28261 | acctgatgac tcttcctcag ccatctccac accacctgtg ctggagccag gacatgcctt |
| 28321 | cagccaggtc tgccttttaa cagcgaatga gacggtagct ctttatcagt tctttctacc |
| 28381 | tcattcgaaa taaaggaggt agggcccaga ttgtaggtaa gatgagaaga ggggaatcta |
| 28441 | agaactctta acagggcaaa atcacctcca gggtggtggc gggggtggga gtggggtcat |
| 28501 | ggcacgcgtg gccacagaag tgcctccaaa gaccaacttt tggactttgc cgacctgagc |
| 28561 | atttctctgc ggggccatcc tgggtttgtg gacgttcatt ctccttccac ctctactctt |
| 28621 | aggactctgc agagaaagtc tagtgctggg atattattcc atatggtagc ttgtatgtgt |
| 28681 | ctctttacac ttacattaaa taaatacagt gtaaaactta gctcctcagt ctcacctcag |
| 28741 | tgactgcatg tggctagtca ctcctccctt ggacaggaag ttctactggg cagtgctggt |
| 28801 | ctagagaaca gtgagtcaga gagggtccct ggtccgctgc ccttgctctg gggcaggcca |
| 28861 | gtacagtgac caggtgatga atgcctgatg gcaggggcag gtaagagcaa gcatgcgggt |
| 28921 | gggtctcggg acccatctga ccgcagaagg tcacagacac acaggtgaaa gggcagtggg |
| 28981 | ggctgaggat gggaagaagt aggtccctgg cttcaggaac atggccaggc cgaggccaca |
| 29041 | cggggcactg agatgagagg ctctgacaga atgacagggc ccagaggttg cctaacaacg |
| 29101 | tgatgtctgg catggtgggg agctgggggt tttattgttc aatggaattt ggaagaatgt |
| 29161 | ggcagttggg tcttgccgac agcagttggg tttatcgagt ttgctttctc cagtccagtc |
| 29221 | aggctcctgg cgggggagtg gggggacctc ctggtttgca gctctgctca cgccagggac |
| 29281 | ccccctcccc acagtgttgc tacaggcaga aagcctgggg tgggctctgg ctctgccatg |
| 29341 | ctctagaggt gccttctggt ctgcctcctg tcccctcccc ggtcttgggc cccattcctc |
| 29401 | accccattca cgccggcctt gtctttccag gtgaaagagc tcgtcctgga caattgtcgg |
| 29461 | tcaaatgaag gcaagattga aggcctcaca gatgaatttg aagaactgga gttcttgagt |
| 29521 | acaatcaatg taggcctcac ctcagtcgca aacttaccaa agttaaacaa acttaagaag |
| 29581 | gtaaatagag cgcaggaggg gctatgcccg ggaggcctgc cagttccccg agcctgtgtg |
| 29641 | cgggagccag gcccttgagc ccagggcctt cgttattgta agagctcttt ttgctttttc |
| 29701 | tctccctgcc ccgtttagct tgaactaagt gataacagaa tctcaggggg cctggaagta |
| 29761 | ttggcagaaa agtgtccgaa cctcacacat ctaaatttaa gtggcaacaa aattaaagac |
| 29821 | ctcagcacag tagagccact ggtgagtcac tggggttctc tcctctgtac tggggtggga |
| 29881 | gggattgatg ttggggaatg ctgcctttga tttgtataac atgctggcgg gtgggagggg |
| 29941 | atggcttatc tcactttatt tgactgtcat tatatgctgt gagatggagt tggagctcct |
| 30001 | acttctgctt tgtccatgaa gaagctgagg cctagagacg ttaaagagct tgaccaaggt |
| 30061 | caaacggtca gaacaggcat cagggtgaag gaaaccctaa gtcccaggtc tcggcttcca |
| 30121 | gtccagcact tttcctcttg agcgtttctg cccagccttg gaaacccgag ctgtcatttc |
| 30181 | ttcaggctta gagcacggct tgtgcccttc actggggagg ggggaaccac ccaggaatta |
| 30241 | agcttaccct ggaggtggcg acctgttttc tccatgggtc actagccaga ggctactgcc |
| 30301 | tctagattgt ggcaggtggt cctgacacag gcccctggga tgacagagag ctgtgtggca |
| 30361 | tgggagtccc atgtaggctt tcctctgtga gcacagagca gagtggctcc gggtcatcag |
| 30421 | tcctgagtgt gatggtgacc agggcctcag agccctgggc ggtttcttct tctgctcgtt |
| 30481 | cacatacagc tgagcatacc ctaaacttta tgattcacta gccagaaagg ggtaggtcat |
| 30541 | ggtcagaata gcaatttctc cattatcctg gtctgagtga atgtattctt ttgagttcaa |
| 30601 | ggaaatcaac tgtaaggtgt gtcattgatt aatgatagct tttttgaaat atagaagtac |
| 30661 | tactgcatta cattaacaca ttgtaaatat gaatttgttc ataagccatg caccttagaa |
| 30721 | tcagggaaag gccatgagga tatttggcca agttggccat gtttttcttt tctgggtaga |
| 30781 | tagggtggca gttggggcat ctctcagggt ttttgtgcaa aaagcattcc ttgccctcca |
| 30841 | cagaagctca gggttcaggt tcatgggcca gcatggcaga accggaagca gacatttctc |
| 30901 | ttccaaactc agactttacc tgcccttgac caggtctcag tcacagactc ttaagagagc |
| 30961 | aacctagttc ctgacactga ccataagaga cagtaacttt aatcaccagt caggcctggc |
| 31021 | cccgttggaa cagggacttg gcctggggca gggtacctgt gtcttgaggg gaatcaagat |
| 31081 | gtagctgttc cttgttagct gtgtgaccct ttcacttcct aggcctcaga ttccagccac |
| 31141 | caaacaggtg taaggtgtag tatgggctga aactaatcgg taaaaagctt tgcacaaagc |
| 31201 | aaatcatgtt aagaactact gacaaaatct gaagacttca tttcctcttg tcctttttga |
| 31261 | aagtcggtgt tggaagagta aaagcacagg tctgaggttg ggctgcctga tccaatccca |
| 31321 | attctctgct ctcttcttcc tcatctataa catgaactga taattatttc tgccttattg |
| 31381 | gggctataag gataaattga gttaataaag tgctatatta attgccgtta ttacttttat |
| 31441 | tcacagaagg agttagttat gttcctgtgc ccttctcagt tcccctctgg caccttagtc |
| 31501 | acaggagcag gcagcaaagc ttttggcacc aagagagccc ggtttatttc aagcccgcca |
| 31561 | ctgttacggc aaaagctgtc attgccaaac aaaagaacga ggtcttgcag atccttaagt |
| 31621 | ccaacccccc atcttccaga taaggaacat gaaccccccc ccctccgccg caaaccaggg |
| 31681 | gtctcatggc tgagcaaagc cagagtttgc ttgtcacctg cgggcgggaa gctctgcaca |
| 31741 | cctctcgtgt cacccccaac tgatccccct gccactgtcc actctgtttg cttgcagaaa |
| 31801 | aagttagaaa acctcaagag cttagacctt ttcaattgcg aggtgaccaa cctgAATGAC |
| 31861 | taccgagaaa acgtgttcaa gctccttcca cagctcacgt atctcgatgg ctacgaccgg |
| 31921 | gacgacaagg aggcctctga ctcagacgct gagggctacg tggagggcct ggacgacgac |
| 31981 | gaggaggatg aggatg |

[0069] Porcine ANP32B has seven isoforms, the complete nucleotide sequences of which can be found in the Ensembl database under Accession Numbers ENSSSCT00000005912.4, ENSSSCT00000054395.2, ENSSSCT00000068404.1, ENSSSCT00000062686.2, ENSSSCT00000045745.2, ENSSSCT00000044227.2, and ENSSSCT00000055524.2. Of these seven isoforms, the isoforms encoded by ENSSSCT00000005912.4, ENSSSCT00000054395.2, and ENSSSCT00000068404.1 align closely with human ANP32B. The complete nucleotide sequence for ENSSSCT00000005912.4 is provided herein as SEQ ID NO: 4. In addition, a partial genomic sequence for ENSSSCT00000005912.4. is provided as SEQ ID NO: 5. SEQ ID NO: 5 is used as a reference sequence herein. SEQ ID NO: 5 includes nucleotides 2 through 20,343 of SEQ ID NO: 4, corresponding to exon 1, intron 1, exon 2, intron 2, exon 3, intron 3, and exon 4. Table 3 provides the locations of the exons and introns of the ANP32B gene in SEQ ID NOs. 4 and 5.

TABLE 3
Locations of exons and introns of the
ANP32B gene in SEQ ID NOs. 4 and 5

| | Location in SEQ ID NO: | Location in SEQ ID NO: |
|---|---|---|
| | 4 (nucleotides) | 5 (nucleotides) |
| Exon 1 | 2-410* | 1-409* |
| Intron 1 | 411-10,823 | 410-10,822 |
| Exon 2 | 10,824-10,973 | 10,823-10,972 |
| Intron 2 | 10,974-14,272 | 10,973-14,271 |
| Exon 3 | 14,273-14,395 | 14,272-14,394 |
| Intron 3 | 14,396-20,153 | 14,395-20,152 |
| Exon 4 | 20,154-20,343** | 20,153-20,342** |
| Intron 4 | 20,344-22,651 | — |
| Exon 5 | 22,652-22,776 | — |
| Intron 5 | 22,777-24,438 | — |
| Exon 6 | 24,439-24,513 | — |
| Intron 6 | 24,514-25,741 | — |
| Exon 7 | 25,742-26,343 | — |

*Exon 1 of the ANP32B gene includes a 5′ untranslated region (5′-UTR) at nucleotides 2-356 of SEQ ID NO: 4 and nucleotides 1-355 of SEQ ID NO: 5. The start codon is at nucleotides 357-359 of SEQ ID NO: 4 and nucleotides 356-358 of SEQ ID NO: 5.
**Exon 4 of the ANP32B gene includes the nucleotides that encode asparagine 129 (N129) and aspartic acid 130 (D130). These amino acids are encoded by nucleotides 20,211-20,216 of SEQ ID NO: 4 and nucleotides 20,210-20,215 of SEQ ID NO: 5.

[0070] Table 4 provides an annotated version of SEQ ID NO: 5, showing the locations of exons 1, 2, 3, and 4. Exons 1, 2, 3, and 4 are shown in underlined text. Coding sequence is both underlined and bold, while untranslated sequence that is part of exon 1 is underlined only. The codons that encode asparagine 129 (N129) and aspartic acid 130 (D130) are shown in uppercase text.

TABLE 4
Annotated version of reference sequence SEQ ID NO: 5 (partial
ANP32B gene sequence)
SEQ ID NO: 5

| | |
|---|---|
| 1 | accgcggctg ccgagccgag cggcgccgcg cggggccgag tcgagccgag cagccacccg |
| 61 | cgccgcgtcg ccggtttaag cgcagtgcgg agccgcggcc gggggcggcg gtagtgagac |
| 121 | cagcgctgcg ctccagcccc cttttccctc catggtttct ctccgctccc gtgagtaact |
| 181 | tggctccggg ggctccgctc tcctgcccgc acgccgccag ccgccccgga ccgcgccgcc |
| 241 | ggcctctgcc tcgagcagac cccttccgac ggccctcgct gcgcaggctg ggagcctctc |
| 301 | ccccctccgc ccccgttgcg gaaagttaag tttgaagagg ggggaagagg gaaacatgga |
| 361 | catgaagaag agaatccacc tggagctgag gaaccggacc ccggcagctg taagcagaat |
| 421 | ccccttcggg ctccctctcc ccccgatgac ttgcatgtaa tggtggccac ctgcggggtc |
| 481 | ccagacgcgg gctcgccgac cccggcgcgg gcaagagcgc agctcgcggg ctcggacggg |
| 541 | aaaggcgggc gggcaggcgg gcgggcgcgg aggggggagc gagcgcgcgg gattaactct |
| 601 | ttggcgcccg cgggcccctg cggccgtcca gggaaggcgg tggggtgggg gaaagcaaac |
| 661 | tttgagctct tcgcccgccg gggtcctttc ccgaaggagc gcgtgtgcgt gtggccggcg |
| 721 | gcaagagagg gaggaggggg ttgtgtaacg ctgggagcca tgtttgcagc ctcccgagat |
| 781 | gcgcggccgg gcggaggccg ggcctacgga ggagccgcgc tgccagtccg gactgggccc |
| 841 | gctgcgggcc aggccggcct ccgcgtgccc ccggccggcc cgggaggggg ctcgggcgga |
| 901 | gcaggaggct cctccagcca ggtctcgcgg ttggcgccgg tccggccagg acgggagcgg |
| 961 | aaggacgaac agagggttct ttgcctccaa gggggacagg aagccccctc gggcgccggg |
| 1021 | gggcttgggc gggcgcggcc tggcgcgcgc gagctgggga ggggcgagcc cgggtggcgg |
| 1081 | aggtggcgca accgacgccc ctcccgaggc caagtttgaa aaaaggagtc ggttcccgcc |
| 1141 | atttttcaag cctaaaaata aaactttgtc tacctatctc tcgcgcccct ttcgaccccc |
| 1201 | aggccttccc cagtcccggt ctccaaatgc aggccgcgct cggcccgagc tagcagttgt |
| 1261 | ggcgtaagcg gcttctccct cccccccgcg ccgcggcggc ggagcccggg ggcccctgcc |
| 1321 | cgggaggttg gcccctcggt gtgggcgggc ggcggctcct cgcgtcagcc caggcgcgcc |
| 1381 | acaggccgac gcagcgccat gttggcgggc acccgtctcc ttccgccgcg tgagtcggcc |
| 1441 | tgcgggctct gtccgtccgg ccctgcccgc ccgcaccggc ggtggctctg agccgccgct |
| 1501 | cccttggccg agcctgcggt ttgtttggcg cgggcctcgc cagggctcgg ctcgcactgg |
| 1561 | cgggagccga gcgctccggc cgtcgccgac tcatctttcg ggcgcgctgc cgccccctcc |
| 1621 | ccccttctta aaagggcaac ggcaggcggc cgcctccgcc cctagtcgcg ggtacagacg |
| 1681 | ggcctcggct gtgcttgctt gccgggcggg cgctgccccg cacgtgcttc agagccgcag |
| 1741 | atccaggccg gtgctcgcct gccgcggctc cgtgagtcgc tggtgggcct tgaagagtca |
| 1801 | cgtctttatt ctctaccccg ccctccccgc gaagtagagc ggcttcccgc ggcagggcgc |
| 1861 | ggggccatgt ttcctggcgc cagcgctggg aggccgcgcc tccgccagaa cccctccgcg |
| 1921 | ggtgagtggc gtcccctggc agaggggcgg cccggggaaa gccctcacca ccccctcccg |
| 1981 | cccctgcgcc ccacactgga gacgggcgcg tttcgggcag tcaggtagcg ttgggtaaca |
| 2041 | agttgccaac ttgtgggaat tcgtcaagca ggctttccct ggtgtgccag gggttttaaa |
| 2101 | tctctgaggt ccccacaaat gaggtgcggc cctgctgcat ctggtgttcc cacctctccc |
| 2161 | tggaagacct ctggtggtgg gcgtctcgac tctgtcccct gagttttaag gttgagattt |
| 2221 | gaccgcggtc gtcccttccg tccatcagtc agacattttg tgtcggccac gtgctagtac |
| 2281 | attgaacctt taagcctctt cacactgaaa cttgcaacct aattttgaga agagttaaga |
| 2341 | catttgaatt attactgctc aggtccaaat caggtgaacg tgagtaatta aatttacccg |
| 2401 | agtttccaaa aagaaaaata cgtatatggt tctttaaagt gccttaagat ctgggatttg |
| 2461 | gattttagca atgtgtgtag aacagtatta aaatactcgg ctaagggctc tgtggctccc |
| 2521 | tctgagaaga aatacaactg agctggtggt gtatatggaa ttttttcgca catgaaataa |
| 2581 | ctaatactga tttttaaaat gcatatttat gtgcgttggg ccttttattt tttttcccat |
| 2641 | gaaatcaact taagccttac ccttttgcca aaacagtttt tagtcatgtg gctttttaaa |
| 2701 | ttaaaaggtc attttgccag ttgcactatt cacatttcaa gtactcagaa gtcccaaatg |
| 2761 | attaggggct gctgtattgg acagtactgc tctacagtaa ttcactggtt ttattaaata |
| 2821 | aatatttgcc aacagcatgc cagggcctgg aaaaacagtg aggcagagcg cagccccttc |
| 2881 | cattctgaag cctcagtaac cggtggtgcc tgttgcctag gtgcaagtta ggggccttgg |
| 2941 | gagagtgtca taggagccag ccaagattgt gggggcaaag ggtcccctag ggactgtaac |
| 3001 | agggagactg aaaacagtaa gagaggttct taggagagga aagccttgac cttcaactga |
| 3061 | ttgggggggg gtgctgtagg tttaaaggaa attttttttt ttttgtcttt ttgccatttc |
| 3121 | ttgagcagct cctgtggcat atggaggttc ccaggctagg ggtcgaatcg gagctgtagc |
| 3181 | caccggccta cgccagagcc acagcaacgt gggatccgag ccgcgtctgc aacctacacc |
| 3241 | acagctcatg gcaacgccgg atcgttaacc cactgagcaa gtgcagggac cgaacccgaa |
| 3301 | acctcatggt tcctagtcag gttcgttaac cactgcgcca cgacgggaac tccggtttaa |
| 3361 | aggaaatttt aaaagaagag tttaaaattt ttagcacaaa agcatcatct ttaaggtaag |
| 3421 | tgagaggttc caagatgatt ctaagtcagc aagtcttatg ggtttgttgt ggcgcgagac |
| 3481 | tggggaaagg ggaagaaccc tctctccatt gaatgtattg gtataacaca acgaaatgca |
| 3541 | caacagtgta ttccagatgt catcaagtgg aatagaagac tacttgagag taagtggagg |
| 3601 | cttgatcata aatgttttaa gaccagatag gcttttgagt atggcttttt ttttaatttt |
| 3661 | tttatttggg ggtttgaaga agaccctggt aacagtttac cttgtaagtc caaaacacct |
| 3721 | ttatatcaga agtgtctttt catagtggaa aaagtggctt aagatggcat ttttttttaa |
| 3781 | tttcattttt tatttttttt aatttttcat cataattttt tttttttatt ttcccactgt |
| 3841 | acagcaaggg ggtcaggtta tccttacatg tatagattac aattacagtt tttcccccta |
| 3901 | agatggcatt ttaacatatc tttgaaaaga ataatgatca gtgaaaatat aggcaaggag |
| 3961 | aggaaaattt ttatacaaaa tattagtatt aatttcactg agagcaaatt gtatagtgcc |
| 4021 | agaaaagtac cactgatatt gattcacata ttggtggtgg tatcagatgt gaagagacat |
| 4081 | gcaatatcaa gacgtaaacc aaatttagat atattccata attggaaaaa acacctgttc |
| 4141 | attatatgag gccctcatct ttctattttt ccaaaacatg gcactgttat taactatgga |
| 4201 | tctgggaaca tctgtccttc agtcttatgt tcaaaggata gaaagccatg cagttcctgt |
| 4261 | ggcttgtaat ctatgcccct gtgaaacact gtatgcttga ctgagacatt tcatatccca |
| 4321 | caaataatag tttttctcct aggcccaatt tactggagaa ttaagggttt tcttacatta |
| 4381 | caggttttca ttatgtattt ttaaatcccc actcccccac ttttggcatt tattgttgtg |
| 4441 | tctgttgtga ttttgagctc aatgggatat tctaattggt tgcaatagcc gctaattggg |
| 4501 | gttatttcct tatgtaagta gtgcctcttc attgaggata aattagatgc agataagcaa |
| 4561 | aacaatagta gatataaata agaaaaattt aaagaacctg aaaatctcac acacacccat |
| 4621 | cctaccatgt agatattctg gtgtagagtc cacgagaatg tttaattttt tccgaactca |
| 4681 | aattatactg ttaatgcata tactatctcg ttgctaatat agtagtaaac atctttatct |
| 4741 | tctatggcac aatttattat tttacagtct cattgttaat gtctatacag atcatgtaac |
| 4801 | cattcacatt aagtgaccag aaggattttt gcttttttaa atagtactga aatgaacatt |
| 4861 | tctacctatc agtaggatat gggtgtttcc ttccttcatg acacccaaac acatttgaga |
| 4921 | actactaatt gtaaattctg ttgtcatttt gaaaacgtac ttttaaaata atagtagggt |
| 4981 | ggaagagttt aagattggtt aactcatgag gctggaaatt gtcaaaggtg gcaggagtta |
| 5041 | ctttccacat ttttgttttt ttttgttttg ttttttgttt tgtctttttg tctttctagg |
| 5101 | gccacacccg aggcatatgt aggttcccag gctaagggtc caatctggag ctgtagccgc |
| 5161 | tggcctgcgc cataggcata gccatgccag atctgagtca catctgtgac ctacaccaca |
| 5221 | gctcacagta acgctggatc cttaagccac tgagcaaggc cagggattga acccacaacc |
| 5281 | tcatggttcc tattcggatt catttctgct gcaccatgac aggagttcca ctttccacat |
| 5341 | tattggatta tttcacttac tgcaataatc atgtattttc taactaaaag aattgataat |
| 5401 | gacctttacg cctccatatc tttttttccc tcttataaca aattataact gataaatggg |
| 5461 | gaaggtcact caagcaggta gggaaaattg attttttttt cccctagact aactagggga |
| 5521 | ataggaaatg agagcatatt ggagaggatg aaaagaaaat ttcttgatct cctgcggcta |
| 5581 | ctagctccaa tccccgtaac ttggctacag taaatttcaa agttttcact gactagttgt |
| 5641 | gagtgcatca gctttgctga tggctataga aaacaaaaaa attggatagg aaatgttttg |
| 5701 | gaattttgtt tttagctctt aaatgtttac ttaaattcat atttgacaaa aagctagttt |
| 5761 | agttgggaaa acgggggatc aagaagagta aatttggccc ccagtattag tctatccagt |
| 5821 | tactactttg gatcaaatag ctccctaagt tgaatgcaca aatagagaaa tacctgccca |
| 5881 | accttccagt attacatggt agccttgaga ggatttggga catgaggaag aaagagtagg |
| 5941 | gtgtttttcc ttgattagaa ccttctgttt atttggggtc taattaggag gccatgacac |
| 6001 | tatctctgcc ccgcatgctc caagcacctc ccttgttaag gcagtctaga ttccttcaca |
| 6061 | ctccaggaag caaattgggg agagggaggg tttaattatc tcatgctgct gtcatggtgc |
| 6121 | ctaaatacag acaccttttc accagggtcc tatttagatt ttggtctttt tagggctcgg |
| 6181 | atcccaagtt gctgtggcat aggctggagg ctgcagctcc gattcgaccc ctggcctggg |
| 6241 | aacctccatg tggtgtagga gtggtcctag aaaaggcaaa aaaaaagtaa ataaataaat |
| 6301 | aaaattaatc ttttgcagtt cctattgtgg cacggtgcag ttgaatctga ctagaaactg |
| 6361 | tgaagttgcg ggttcgatgc ctagcctagc tcggtgggat aaggattgga cgttgccccg |
| 6421 | agctgtggtg taggtcggca gctgtggctc tgattaaccc gtcctgggaa cctccatatg |
| 6481 | ccgcaggtgt ggccctaaaa aagaaaaaaa aaataaataa aatgagtctc acataaaaag |
| 6541 | acagcatgac attatttatg agaaacgtgt tcaacagaga agattataac ctctggtaca |
| 6601 | tccatatgct tagaatttct ttagtcgtta agaaatattt agagttgtta aaagcatatt |
| 6661 | aagtaatatt gcttcatctt gctaagacta aaaaaaatac caaaatagta agtgacaaac |
| 6721 | agtaaatgct ttgcattaat tgattatatt taggatcaga cggtagattc tcttcatatc |
| 6781 | caagtttccc ctggttcatc atctgctcag tcccctgcag tcctgattga tgtaaacctc |
| 6841 | tatgccattt ttttcttcat ttgacagttg tgaaggcttt tttttttctc agcttgcacc |
| 6901 | catggaagga acaaacccaa gtcacagcag tgaccatgct gagtccttcc ttaaccccta |
| 6961 | ggccaccagg caactcctga aggctttttc tcatattgag atatggtgat aactaaaaca |
| 7021 | gatatgacct taccatgaag cagtgactcc tccaccccta cacctgtgac acatggaagt |
| 7081 | ccccagtcca gggatccaat ctgagctata cctgggaaac accaggtttt taacccactg |
| 7141 | cacctggctg aggatcaaac ccgcactgcc ctgaggcaat actggatact aaaccagtgg |
| 7201 | caccacagca ggaactcctt agcagtgacc tttttaaaaa tagatcaata ttcttattat |
| 7261 | tgaaatgttt aaataaggtt atggaggagt tcccttatgg tgcaggaggt taaggatcca |
| 7321 | ttgccactgc agtggcttgg gtctctgctg tggtgtggcc acacacacaa aagttgtgga |
| 7381 | agtctcccag ccagtcaact ttccctgagg agaattcttg agaagactat aagaaagcaa |
| 7441 | gtgtgtgaaa tgttacataa gggataacgc attatatatt ctctaccatt tttgtcccac |
| 7501 | agcatatcct ggaaattagt ccctccttga tggacaatta aattgccttc taattttctc |
| 7561 | agttcttttt tttccagtta cttcttatgt cttatttata agcctttcgg agtgttgaaa |
| 7621 | ctaatgggtc acctttgggt actacaaacc caattctaat tggtactaag accaattctt |
| 7681 | cttaagtctc ctttgcagga tcccccaggg ttccatcctt ggttctcttc ctaggaattc |
| 7741 | catccttcta ctttttattg cttctgccct gacttccaaa tacagaactt aaaccgagga |
| 7801 | ctcccctgaa ctccagacct gcatgtctag ctgactgggg atactttcat ctggatatcc |
| 7861 | catggaaaca aacttggtat cttttgtagt agtcattaca tatctgcctc tctcccaaaa |
| 7921 | agaagccact ccttcctatt tccatctagc tacatagtcc ccatttctca aacgaacctc |
| 7981 | agttctttat catcttttgt accccacagt taaacttgca gattttgacc actttaactt |
| 8041 | ttttcccctc ccagtttctg ttatttggtt cagcaaactt aattctctca tatttgaatg |
| 8101 | ttttatggta gtcttttttt gggctatgcc acggcatgtg gaagttcccc gtccatagat |
| 8161 | tgaacccaca cctgagccac tacagtgacg ttgctgaatc cttaacccac ttcgccgcaa |
| 8221 | gggaactcca gctttatggt agtctttgat gaccttagtt aaagcagaat tttgtcagtt |
| 8281 | gagaacaatg tccaagagtt gatttcacag tggactcgag gtataatgtt taaactcctc |
| 8341 | tgtggctttt gacatattgg tgtcatcttg tataatattt ttgaattctc tgtcagataa |
| 8401 | tagttgtaga aaatctacca aatgaaatgg aaatgtttag ctgtattgca atactactta |
| 8461 | ggtgagtggt gattacagtg gccttttttt tttttttaat gattagttgg ttttagggtt |
| 8521 | ttttttgttt tttgttttct tttgagggcc acacccccag tgaaatatgt tagttcacag |
| 8581 | gctaggggtc taatcagagc tgcagctgct ggcccatgcc acagcaccta gggatctgag |
| 8641 | ccacatcttt gacctacacc acagcttaca gcaatgccag atcctttaac ccattgagtg |
| 8701 | ggtccaggga tcaaaacctg agtcttcctg gatactggtc aggtttgtga cccactgagc |
| 8761 | cacaatggga actcctgttg gaaagcttgc ctggaggtta cttcctcttt tatttttttg |
| 8821 | gccaccctgc agcacatgga gttcccaggc cagagatcaa atcctagcca cagttgcaac |
| 8881 | tttaaccctc tgtgcctggc cagggatcaa acctccttcc caagaggctg ttgagtcctg |
| 8941 | ttgagccaca gcaggaattc cagtttgttt gtttgtttgt ttttctttct ttttttttac |
| 9001 | cttagggctg caccgtggca tgtggaggtt cccaggtact aggggtcaac ttggacctgc |
| 9061 | agctgccatt ctgtgccaca accacagcaa ctccggatct gagcctcatc tgtgatctac |
| 9121 | accacaggtc acagcgtgtt tgtttgtttt ttaatacaca agaagtacaa agagttccca |
| 9181 | ttgtggctca gctacctaaa aacgcaattg gtatccacga ggatgcaggt ttgatccttg |
| 9241 | gcctacctca gtggcttaag gatctgtcat tgtcacaagc tgtggcatag gtcacagatg |
| 9301 | atgcagcttg gatctggcgt ggctgtggtg tgggctgaca gctgtagctc ccactccacc |
| 9361 | cctatcctgt gaacttcata tgccacaagt gcagcccgaa aaaggaaaaa aaaaaaaaaa |
| 9421 | aaaaaagagg aatacatgct tagtacagat aggaataaat tgcaacgatc cttgtcattc |
| 9481 | tccttcaccc ttgcccagag gttactttct cagcatttac tctgtcccaa gcctactttc |
| 9541 | tacagaagtt ccacttcaca gatgaggaaa ctgaggcaca gagaagttaa ataacttgcc |
| 9601 | caaggtcaca caggttgtaa gtgacaaagc agatagaatg gaacctgtat gcgtcctgaa |
| 9661 | agcaggacgc agacagggga gtgagaagtg ctgaagaagc aagtgagaag ttgtggtgtt |
| 9721 | atcggtgaat ctctaaatct gtttgcttct ctaactgggg ggagggtatg gtggtacaaa |
| 9781 | gaataatgag taaattctcc atagatgata gcaattacta gagcagtatc cttggacttt |
| 9841 | gtatgagagg atgaagatgt tactacctcc tgttttcatt ttaaaactgt cagcaagcat |
| 9901 | ctccttccct tatacatgct tgattaatgc tattaaatgt gttagattca ctgcaagaat |
| 9961 | gcctttggca gttaaaacta atttgcatca gtgtaaattt atcaaaacgt gtttaaaact |
| 10021 | tgcaagcttc agagtcagcc acagagcaag aacagcagta gagactatca tggtagatag |
| 10081 | tcacacagta gactgtttat tagataatca gtattcaaaa ttctcagata tacttttgga |
| 10141 | tggatttgaa ttctgaatat taagatctcc aaagaaggag attttatggc ctaaaaagaa |
| 10201 | cctaatatct aacagtttgc ccccccagaa atagctttct cacatgtaac acagaatgat |
| 10261 | ctttgaatta agacctcctg tgtcttgatc ttttcctaat atcaagataa tctaagtaaa |
| 10321 | aattaataaa accacaagtg gaaatgtgta gctgagaaac ctgtagccaa aatctcttag |
| 10381 | tgatcttgat gggagaagta aagctttcct cttttctttg tgtcagtctc ctgcgccttg |
| 10441 | agctaggctt ggcctaaaag ggttgctggg gagagtggtt tgggaaggga taatcttcac |
| 10501 | tctgcatttg tagttaaagc tactccttgg ggaagagact taggaaaaag aataaggggg |
| 10561 | gtgtcatttc ttcacttaca tcctaaggac tatagtttct gtctctggaa agtaaagaat |
| 10621 | ttaaatcttt gttgtacatg gtgtgacatc ccacccttga tatctatcag aatattgtta |
| 10681 | ctaaaggctt aatcgttttt cctttattta tagctgagcc aggtctaagt agagcctgcc |
| 10741 | cctatatggt tggagttttt gctttgttct ttgttttcta tatggttttg aaagcttgtc |
| 10801 | tcctcctctt tgtcacccac aggttcgaga acttgtgctg gataattgca aatcaagtga |
| 10861 | tgggaaaatt gagggcttaa cagctgaatt tgtgaactta gagttcctca gtttaataaa |
| 10921 | tgtagggttg atttcagttt caaatctccc caaactacct aaattgaaaa aggtaagtgc |
| 10981 | tttttcttta acagtaaaag agagaaccat tctggggaag gggaaaatat atgattctat |
| 11041 | ctgtaaggaa gcatttagtg tagcagaaag cgcatggcct ttggaactgg gcagatcagg |
| 11101 | gattgaattc cagctctatc atttccctga tgggtgatct tctgcatgtt acttaatctc |
| 11161 | tccaaggctc aatttcctca cctgtaaact ggtgatacca cctgaccttc cagaatggct |
| 11221 | gtggtgtttg aaagtagtgc atgttgaatg ctcaataaat aaatagtggt tatgaagaat |
| 11281 | aattgttagg gatttattgt aatgtcagct acttttgttc ttaatatgct ctggcttagg |
| 11341 | aatcacaggt gcctcccact cttcatgttt ttttgttaag gccaagttta agtaaaggct |
| 11401 | tttcaaattt gtactccatg gtatttcaaa ctcagtatat aattgttatt tttgcttttt |
| 11461 | agggccacac ccacggcaca tggaggttcc caggctaggg gtcaaatcgg agctgtagcc |
| 11521 | acgagcctat accatagcca ggacaatgcc agatccttaa cccacagagc aaggccaggg |
| 11581 | atcgaacctg catcctcatg gatgctagtc agattcgttt ctgctgagcc acagtgggaa |
| 11641 | ctccccatta tgtaattctt aatgactggt aagtttaaaa tgtgatttac tccaagagtt |
| 11701 | cattttaaca acattgctgt atttccctgt cctacttgat agctcattgt tagtgcttta |
| 11761 | ttggtctaat tataatcaat cattgtcacc ttcaacctcc ccctcaccca aaaaacatgt |
| 11821 | ttttttcatg tccttgcaca tttacctgtc acagagcccc cagtatgtca gaagtggaag |
| 11881 | aaacttatat cttgtggcct cggcctttgt tttataggca cagtagtaga tccagaaagg |
| 11941 | tatggtaatt tgcctaaagc cactcacgaa agtggttagt agtagagcca gaattagagc |
| 12001 | tcatatcttc tatttgctaa cccagtacct tttccattgg cagtgttgca gaattctcca |
| 12061 | ctgtttacct catctctgta tcagggagtt tgagctgaac ctttaatcta aaaaagatac |
| 12121 | gcatagaaat ctgaagtcaa atttaggcca aagacaagta agctgttcct atagcctgcc |
| 12181 | tgcttgaatc ccgagaggga cttttttttg gttaagtata tgaattaaaa atcaggagtg |
| 12241 | ggagttccca tcatgacgaa gcggaaacaa atccgactag gaaccatgag gttgcgggtt |
| 12301 | ccatccctgg cctctgtcag tggattaagg atctggcgtt gccgtgagct gtggtgtatg |
| 12361 | ttgcagatga acctccatgt gccgtgggta tggccctaaa aagcaaaaaa aaaaaaagaa |
| 12421 | aaaagaaaca ggttctggga gaaattttgg tgtgtaaatg tcacaagttt cctaaattta |
| 12481 | aacattgatt tcatttcaaa ataaatatgc cactaaatgc tttggcaaac tgccttgctg |
| 12541 | tccctactcc ttaagatatt tgtgttgaaa ggatatgaat attatacgta tcgatattct |
| 12601 | aacaaccaag agaaatggtc tctattttga atttctaaaa cctgtgtaaa gctaataaca |
| 12661 | cttgtgtctt tgttggtata gagatgtatt ttaaaatcta gaccacagtt agatctttta |
| 12721 | ttggactatc ccattggaag gaaaaaaaag ttttgaacta ctgcattttt tctcttctga |
| 12781 | aatacttaaa aacaaccaag cagcagactt actttttttg ttgttgttgg ttttttgttt |
| 12841 | gcttttttta gggctacacc tgcaccatat agaagttcgc aggctaggga ctgaatcaga |
| 12901 | gctgcagctg ccgacctacg tacgccacag caacacctga tctgagtcac atctgtgacc |
| 12961 | tacgctgtag ctcttggcaa tcaatgccag atccttaacc cagtgagtga tgccagagat |
| 13021 | tgaacccaca tcctcatgga tactagttgg gttcttaacc tgctgagcca caacaggaac |
| 13081 | tcccagattt actgtttttt aaactcattc tttcaacaaa tattttaatt tttagaagtt |
| 13141 | cctctgcatc atgtagttca tttcattgca tgcccaacta aatcatgtaa gttttcatgc |
| 13201 | catttatcac tgtaacagct atgtaatctt gggcacttac ataatctcaa tagttcattt |
| 13261 | tccttttctg taaatagggg tgataattct acttgctccg taggatttac tgtgagatca |
| 13321 | gatgagttca tgtatttcta gtgctttgaa tagtgcctta agcacttggg tacttagtac |
| 13381 | ttaagtactg tgtaaaggtt agatacggtt actgttgttg ttggcactta aaattgaaac |
| 13441 | tagctatatg gccttagttt tcgtatctgc aaaatgaaga gtttgaatta gatgctctta |
| 13501 | accatcttat ttttccacgc ttcagtttct tttactctta agattcacat attccttggt |
| 13561 | gaaggttcgt tccttcattg acagaccagt tgccgtgctg cttgatcggc agctaagaaa |
| 13621 | ttagagtagg ttcttaaaaa ggcttcttgc caagtttgtg caaaaagtat cctctgagga |
| 13681 | gttggttttg tcagctttga acctattgcc ccactccctt ttctgaggta atggagcttc |
| 13741 | tttaaaggct tgtaccattc ccatagcttt cagggcagca tttctggtag cttccagatg |
| 13801 | tagaacccca tggcaagtca gcactgtaca gaaccagatt aggtttcaag tgggcattgt |
| 13861 | gagctttgct tggcacacag aacaagctgc ttagaatgca cagaccattt acccttcttg |
| 13921 | gcaggtatcg aatattacaa cttctcaaag aattctaatt tgctttgacc cactttttag |
| 13981 | gttagaaaat gtattcactg atattaggga ccagcaaagt gttctaatta gcagctggtt |
| 14041 | aagaaaacac aactcttttc attcaaattg tctctccttc cccaaagtgt tctggggatc |
| 14101 | tgtaaactta tttgggttta atgaaacaaa atgagcatat gtgccctaat aaaaaataga |
| 14161 | gatcatttga tcttggttgg tgtttaagaa ctatattggt tacttctaac accttaatga |
| 14221 | tatgtgtttc tttttgtgtt tgtgtgccgt gtgcattttt ccctttaaca gcttgagctc |
| 14281 | agtgacaata gaatctatgg aggtctggat atgttagcag aaaaacttcc aaatctcaca |
| 14341 | catctaaact taagtggaaa taaactgaaa gatatcagca ccctggaacc tttggtaagt |
| 14401 | agttgagaat ttggaaaaca ggactttctg gtcattttca ttttcatatt tctttatggt |
| 14461 | gagggaaata attgaaagtt ataatggaga aagtggtgat ttttttatag taaacttttt |
| 14521 | atagaaagag tccagtttta aagatcagag cctcactagt tatgtgttcc tgtggcatta |
| 14581 | ctctcccttt ctgattatta tggtggcttc cttcaaaatg cttttctttt gtccttttta |
| 14641 | aatgtcatat tgactatagc cttaaacatc catcttcaaa ttttttcccc agactggcca |
| 14701 | ggctgttctg tacttttgta cttttccaaa aaggctgttt atgttgggtg gcatatctga |
| 14761 | ctgtagaagg taccatccaa gggcagctcc agtgagtttt aggcctttta attcatgatc |
| 14821 | ttgtgctcta gctggatcat tgttgcctaa agttttgcat gggaacccct aaattctcct |
| 14881 | cttagtcctg gaataagctg tggaaggtta agtttaagtg ctacttgggt tacagacttg |
| 14941 | ctgtgtgacc ttgggcaaat tgcttcttct ctctgggcct cagtttcctc acttatgaag |
| 15001 | cagaaaggat aatcctgcct tacttcttag gaattctgag agtaaaatag gtatttattt |
| 15061 | accttgcttt gtaagttggg aagctaagct aattgggggt ttagtccatg tggaagttac |
| 15121 | aagtggccag aaaagagctt cagaaggcaa gggttcatgc agagtagggg gctttggctg |
| 15181 | ccacctgaaa attccgtgat ttcaagattg ttaaatgact tttcccccta aatatgacat |
| 15241 | tcttgtctat tttaataagg ctaatgaaac tcagatttgt tttataaccg cccaaagaag |
| 15301 | ttttgtggct tctttctggg tttttgtttg tttttctgtt gtacataaag tcagtatttc |
| 15361 | catctgattt aacttgcaga cattaattgg aagagaggct acacagtgga taagagctgt |
| 15421 | ctttcaggat ccagcagagt agaacccaag agtatgagac atccttctgc tatctctatc |
| 15481 | ttttctggtg tcacaatata tttaaatatt tggatttcat tcacttacac agaatgcttt |
| 15541 | attgatattt cgagggaaga taatgtaggg tcagataatt gagactcctc caatatagat |
| 15601 | ttaatcccca tttactaagt ccctttacat ttcattaagt ggatcacatt gagctcattt |
| 15661 | ctcattaagt gttgggagca gcctgttgat tacctttgct ccatgaattt tgcccctttt |
| 15721 | ttcctgttaa actcagatac ttgagggcac cctatttttt taaaattagt tttcctccaa |
| 15781 | atcaatcccc atttccaatg ttaaagcaaa catttattgt gttttgcttt attcagggac |
| 15841 | attaacatct gcccattgta tcctcatatg atgcagagaa gagaaactgt cctgttagaa |
| 15901 | aggaggaaac caagtttaag ccgcaggata aatggcaagt agggattcaa atccaagtcc |
| 15961 | atcattcttt gcactgccct tgggacctgt cttttctttt aatttacacg ttttttttcc |
| 16021 | tacccaaatt gacctaagct gggagttaga acaggagcac taaattaagt gcttaggctc |
| 16081 | tcccagtcag atgggctgca taaaagcctt tgtttgtgtt aatgacgagt ctatcaattt |
| 16141 | agggtcatag aaaacttagg aatccctttt ctctagaaca gagtaccagg cagtaccttt |
| 16201 | ccttgctagg tcactggcca ttgcctaatc tcatggcaac cctagtcatc tttgattttt |
| 16261 | ttcttggagg cttttgtcaa tgtcctaaca ttcagaggca gagcagaagc aaatgttgtg |
| 16321 | tgggagttgt ttgcatgggt gtttctgacc tgggcggtga tgtggttagg gccctttggt |
| 16381 | ggatatgaaa gtctgaatcc ccttggacag tgaaatatga gaaataatca tttaaatatt |
| 16441 | taccatttgc agaggatctg ctttgtacga tacaccaaag tggatgcttt atgtgtgttg |
| 16501 | ttcataatcc tcaacatttc tccagagtgg agagacatag catggcccac gttttacaca |
| 16561 | tgaggaagct gaggcttagg agaggttgaa tcccttgtcc agagtcacac acctggcagg |
| 16621 | ccagtgacag agccacagtg ccacacaccc agggctatct gggaaagcct gagtgcctgc |
| 16681 | cattcttctg aacttgctgt tcagattcct ggatgtacta ggtgggtctc ctgaagttac |
| 16741 | aacttaagga taaataaaac tgtaggagaa agtgtggggg cgggggaaat gttgggtcca |
| 16801 | ttttgacttc tgaaagtatt cttcagttgt gaaaaacacc atcctcatcc tcatcaacca |
| 16861 | catacatttt gaacaccgtc tactttgagc ccagttctta cagtcaatgc aatgattgtg |
| 16921 | aatgcctctg cttactacag ggacattaat cgagagacaa agaaggcatc aattcaaact |
| 16981 | tccttggaca ccttttttaa gagacctggg ccatccaaac catcccccaa agcccttcta |
| 17041 | aattctaaga aggcaagcaa aattattgtt aataaaatgt ttaatgttta ttatggatag |
| 17101 | cctattagtt ttaggccaaa tttctgagat ggtagagttg tgaatttttt ttctttcttt |
| 17161 | ttttttaaag ccgtatttac acattacatt gggatcctga atatctgtgt gtagtgtatt |
| 17221 | ttggaccttt aaagcacagt tttactgctc taaacaattt tagagttcta ccattattag |
| 17281 | gagttttgtt gatgtttatt tggtttcact ttgttttcta gcatattgtt tggcatgtct |
| 17341 | gaattattca tatgggtcct ttctaaagaa gtggccaaaa atgtcacgga ttcagagttt |
| 17401 | cagaaacagg aggccctgtg ttaggctagt caatagagtt agaaaatgtg cttggggcac |
| 17461 | tgttgagcat taagatcagg ggttgtatgc atttttttgt acatccattc ctagggaata |
| 17521 | atattgaaca gtaaatggct gcttccttta agtgaagaat ttatactgag cctctgtggg |
| 17581 | gaaagctgcc taaatttact tgtggttcta tattagctgt tacagagtca acccttttgt |
| 17641 | gaaaagagtt ccccagttgt ctggggtgct atttcaacat tttttccccc tctttggcaa |
| 17701 | gaacgcattc ctgggcttcc ggagttcagg gactgtctag taggaaccta atctgaaagc |
| 17761 | tgcatgtcat aaaagcgttt ctccctgtga gccctagggc tggggacaac tatcttaaag |
| 17821 | aaagacctca ggggactgat ttacataagc acattattgg atcagcgacc tcttggatca |
| 17881 | gtgtacgtgg ctgttttgag gagtacattt gcctgttgct cttaactctg ttctgggtct |
| 17941 | gtgctcccaa gggctgttca gtgagaataa aatcaatgtg ggcacctctt tgatgaagaa |
| 18001 | aatgaaggtt tgtgagtgca ggagtcagca accctttgct ctcaaggacc agatagtaga |
| 18061 | ccacctaggt tttgtaggcc ttagtctttg ttacagccac tccactttgc ccttatagct |
| 18121 | caagagaagc cacacaaagt tcctaaacaa gtgagtgtgg ctgtgttcca gtgaaagtta |
| 18181 | gtttacaaac acgagaggcg ggcaggatgg gccagcacag tttgccaagc cctgctttaa |
| 18241 | agcagagatt ttgacatcat tttgtaactc ccaagaatta tacagacacc gtagatcctg |
| 18301 | aagacaaggt tttgtttcat ctatatctct tcccaggccc ttgtgaatat tgaaatagat |
| 18361 | ttccaatgaa gtatcaaaat ccttaaacat caacatttat tttctgcaac ttacttcatg |
| 18421 | aagagatcct cttaatattt ttttagagaa tggtaaatct tttgattcaa aacctttaaa |
| 18481 | tgctaaattt gtgggagttc ctgttgtggt tcagcaggtt tggaacccag cacagtgtct |
| 18541 | gtgaggatgt cagtttgatc cctgggctca ttcagtggat taaggattca gcagtgctgc |
| 18601 | aggctgtggt gtagtcacag atgcagctca aattcagtgt tgctgttgct gtggtgtaga |
| 18661 | ccacagctgc tgctcctatt cagctcctca cccgggaact tccatatgct acaggagcag |
| 18721 | ctttaaaaag aaaaaataaa taaaggttaa acgtaggaag ccatatatcc atatgccccc |
| 18781 | aggcccccct cttttgcttt ttagggccac acctataaca tatggaagtt cccaggctag |
| 18841 | gaatagattg tagctgcagc tgctggtctc tgccacagca gtttggggat ctgagctgtg |
| 18901 | tctgtgacct acacctcagg tcatggcaat gctggatcct taaccccact gagtgaggcc |
| 18961 | agggatcgaa ccagcatcgc atcctcatgg atactagcag ggttcctaac tcgctgggcc |
| 19021 | acaatgggaa ctccccacag gcccccgttt taaaaggcat cagactacgt agtatttcac |
| 19081 | attttgagtt ttctttttac aggtgtgccc ccttttttgc tctctgtgag ggtctcttgg |
| 19141 | cattttgtta ctatctcctt acttacctat agtactacct atgtcctccc aatcttgtaa |
| 19201 | tttaccctta gtcaaaactt aacagacctg gcattgaaat actgatacac tgatataata |
| 19261 | atgaagacct gagtcagatg ttttcctgtc cacttcacct gctcagaaaa cttggggggc |
| 19321 | caagtttcta gatcttaact ggtttagtta gatgaaactg aagttctaaa caaatgaggt |
| 19381 | gttgcaacaa aacttgaagg tatggtaaaa tcagaaaaat ttttaaagtt ctgataatag |
| 19441 | aacttttccc caaaaatcaa gaaagaagag tgtaatgttc agtcttttcc ccaaaaatca |
| 19501 | agaaagaaga gtgtaaagtt tctctacttg ctgagtttca actctgagtc ccctttcttt |
| 19561 | ttcccccagc ctacattgac tcctgccttt ctgaaaaata gctgcatccc cacactttgt |
| 19621 | gctttactag actcctttgg agtatttaca tttatgtctc caagtagaaa tctcaagaat |
| 19681 | ttcaagatat cgattgaatt aactcatttg atttaatttt ccccctccta tactaccacc |
| 19741 | ttagagcact gactgcttga taatcaagcg ggttcttact ggtcatttga ttactcatac |
| 19801 | attaaaacta gttatttata actaaataaa tttaaccaga tatattaaac tctgtttgat |
| 19861 | ttgtctcaca ctttaaaaag atctagtttt aatgtttcaa aggcatattt cttaagacta |
| 19921 | ctcatgctgc caaaagaaaa ttctctagag gatagtggta gaaggtaaaa agtagttaaa |
| 19981 | aatctagtga cctaatagaa aggttgcgaa ggacttgaaa tgttttccta tgtaaggctg |
| 20041 | agtaggtagc agctaattga atatagagcc tagagtttta cctctttagg aggtgggttt |
| 20101 | tgttgcttgt tcctttggtt taggaggtac attttttgat ccttttcttc agaaaaagtt |
| 20161 | ggagtgtctg aaaagcctgg atctctttaa ctgtgaggtt actaacctgA ATGACtatcg |
| 20221 | agagagtgtc ttcaagctcc tgccccagct gagctacctg gatggctatg acagagacga |
| 20281 | tggtgaagcc cctgactcag atgccgaggt ggatggtgtg gatgaagaag aggatgatga |
| 20341 | ag |

[0071] The amino acid sequences for porcine ANP32A and ANP32B proteins are provided below in Table 5. In human and chicken ANP32 proteins, the asparagine (N) residue at position 129 (N129) and the aspartic acid residue at position 130 (D130) have been identified as being required for interaction with the influenza A viral polymerase. Locations of the corresponding asparagine and aspartic acid residues in the porcine ANP32 amino acid sequences are indicated in the Table 5 below for SEQ ID NOs. 6-10.

TABLE 5
Porcine ANP32 protein sequences

| Protein | SEQ ID NO. | Amino acid sequence | Position of ND |
|---|---|---|---|
| ANP32A | 6 | MEMDKRIHLELRNRTPSDVKELVLDNCRS | N129, D130 |
| (ENSSSCT00000005475.4) | | NEGKIEGLTDEFEELEFLSTINVGLTSVA | |
| Sus scrofa | | NLPKLNKLKKLELSDNRISGGLEVLAEKC | |
| | | PNLTHLNLSGNKIKDLSTVEPLKKLENLK | |
| | | SLDLFNCEVTNLNDYRENVFKLLPQLTYL | |
| | | DGYDRDDKEASDSDAEGYVEGLDDDEEDE | |
| | | DEEEYDEDAQVVEDEEDEEEEEEGEEEDV | |
| | | SGEEEEDEEGYNDGEVDDEEDEEEPGEEE | |
| | | RGQKRKREPEDEGEDDD | |
| ANP32A | 7 | RCLLVCLLSPPRSWAPFLTPFTPALSFQV | N139, D140 |
| (ENSSSCT00000070641.1) | | KELVLDNCRSNEGKIEGLTDEFEELEFLS | |
| Sus scrofa | | TINVGLTSVANLPKLNKLKKLELSDNRIS | |
| | | GGLEVLAEKCPNLTHLNLSGNKIKDLSTV | |
| | | EPLKKLENLKSLDLFNCEVTNLNDYRENV | |
| | | FKLLPQLTYLDGYDRDDKEASDSDAEGYV | |
| | | EGLDDDEEDEDEEEYDEDAQVVEDEEDEE | |
| | | EEEEGEEEDVSGEEEEDEEGYNDGEVDDE | |
| | | EDEEEPGEEERGQKRKREPEDEGEDDD | |
| ANP32B | 8 | MDMKKRIHLELRNRTPAAVRELVLDNCKS | N129, D130 |
| (NANS) | | SDGKIEGLTAEFVNLEFLSLINVGLISVS | |
| (ENSSSCT00000005912.4) | | NLPKLPKLKKLELSDNRIYGGLDMLAEKL | |
| Sus scrofa | | PNLTHLNLSGNKLKDISTLEPLKKLECLK | |
| | | SLDLENCEVTNLNDYRESVFKLLPQLSYL | |
| | | DGYDRDDGEAPDSDAEVDGVDEEEDDEEG | |
| | | EDEDKEEEEDGEEEEFDDEEDEDEDEDVE | |
| | | GEEDEDEVSGEEEEFGHDGEVDEDEDDED | |
| | | EDEDEDEEEEENEKGEKRKRETDDEGEDD | |
| ANP32B | 9 | MDMKKRIHLELRNRTPAAVRELVLDNCKS | N129, D130 |
| (NANS) | | SDGKIEGLTAEFVNLEFLSLINVGLISVS | |
| (ENSSSCT00000054395.2) | | NLPKLPKLKKLELSDNRIYGGLDMLAEKL | |
| Sus scrofa | | PNLTHLNLSGNKLKDISTLEPLKKLECLK | |
| | | SLDLFNCEVTNLNDYRESVFKLLPQLSYL | |
| | | DGYDRDDGEAPDSDAEVDGVDEEEDDEEG | |
| | | EDEDKEEEEDGEEEEFDDEEDEDEDEDVE | |
| | | GEEDEDEVSGEEEEFGHDGEDEDEDEDEE | |
| | | EEENEKGEKRKRETDDEGEDD | |
| ANP32B | 10 | MDMKKRIHLELRNRTPAAVRELVLDNCKS | N129, D130 |
| (NANS) | | SDGKIEGLTAEFVNLEFLSLINVGLISVS | |
| (ENSSSCT00000068404.1) | | NLPKLPKLKKLELSDNRIYGGLDMLAEKL | |
| Sus scrofa | | PNLTHLNLSGNKLKDISTLEPLKKLECLK | |
| | | SLDLENCEVTNLNDYRESVFKLLPQLSYL | |
| | | DGYDRDDGEAPDSDAEVDGVDEEEDDEEG | |
| | | EDEDKEEEEDGEEEEFDDEEDEDEDEDVE | |
| | | GEEDEDEVSGEEEEFGHDGEVDEDEDDED | |
| | | EDEDEDEGGLLRALWGNVSLFFGFLGPHL | |
| | | RHMEIPRLGV | |
| ANP32B | 11 | MKMKSVGRKKNLDMMEKSMKMKTMRMKMR | |
| (NANS) | | MRMKECGADCAKFQKSELEYKENRKALER | |
| (ENSSSCT00000062686.2) | | PYTSKHSWGKTYGEHKRHLEFSHAQYREL | |
| Sus scrofa | | QKFAEEVGIFFTASGMDEMAVEFLHELNV | |
| | | PFFKVGSGDTNNFPYLEKTAKKGRPMVIS | |
| | | SGMQSMDTMKQVYQIVKPLNPNFCFLQCT | |
| | | SAYPLQPEDVNLRVISEYQKLFPDIPIGY | |
| | | SGHETGIAISVAAVALGAKVLERHITLDK | |
| | | TWKGSDHSASLEPGELAELVRSVRLVERA | |
| | | LGSPTKQLLPCEMACNEKLGKSVVAKVKI | |
| | | PEGTVLTLDMLTVKVGEPKGYPPEDIFSL | |
| | | VGKKVLVTIEEDDTIMEESVENHGKKIKS | |
| ANP32B | 12 | MPLELELCPGRWVGGQHPCFIIAEIGQNH | |
| (NANS) | | QGDLDVAKRMIRMAKECGADCAKFQKSEL | |
| (ENSSSCT00000045745.2) | | EYKFNRKALERPYTSKHSWGKTYGEHKRH | |
| Sus scrofa | | LEFSHAQYRELQKFAEEVGIFFTASGMDE | |
| | | MAVEFLHELNVPFFKVGSGDTNNFPYLEK | |
| | | TAKKGRPMVISSGMQSMDTMKQVYQIVKP | |
| | | LNPNFCFLQCTSAYPLQPEDVNLRVISEY | |
| | | QKLFPDIPIGYSGHETGIAISVAAVALGA | |
| | | KVLERHITLDKTWKGSDHSASLEPGELAE | |
| | | LVRSVRLVERALGSPTKQLLPCEMACNEK | |
| | | VGSDPARCFCWEGLQWACLRGGL | |
| ANP32B | 13 | MPLELELCPGRWVGGQHPCFIIAEIGQNH | |
| (NANS) | | QGDLDVAKRMIRMAKECGADCAKFQKSEL | |
| (ENSSSCT00000044227.2) | | EYKENRKALERPYTSKHSWGKTYGEHKRH | |
| Sus scrofa | | LEFSHAQYRELQKFAEEVGIFFTASGMDE | |
| | | MAVEFLHELNVPFFKVGSGDTNNFPYLEK | |
| | | TAKKGRPMVISSGMQSMDTMKQVYQIVKP | |
| | | LNPNFCFLQCTSAYPLQPEDVNLRVISEY | |
| | | QKLFPDIPIGYSGHETGIAISVAAVALGA | |
| | | KVLERHITLDKTWKGSDHSASLEPGELAE | |
| | | LVRSVRLVERALGSPTKQLLPCEMACNEK | |
| | | WDFLAAFILKMHVHWEIKMTVKRNKLPSR | |
| ANP32B | 14 | MVLKDSDLIAVALAFLFSLRECGADCAKE | |
| (NANS) | | QKSELEYKFNRKALERPYTSKHSWGKTYG | |
| (ENSSSCT00000055524.2) | | EHKRHLEFSHAQYRELQKFAEEVGIFFTA | |
| Sus scrofa | | SGMDEMAVEFLHELNVPFFKVGSGDTNNF | |
| | | PYLEKTAKKGRPMVISSGMQSMDTMKQVY | |
| | | QIVKPLNPNFCFLQCTSAYPLQPEDVNLR | |
| | | VISEYQKLFPDIPIGYSGHETGIAISVAA | |
| | | VALGAKVLERHITLDKTWKGSDHSASLEP | |
| | | GELAELVRSVRLVERALGSPTKQLLPCEM | |
| | | ACNEKLGKSVVAKVKIPEGTVLTLDMLTV | |
| | | KVGEPKGYPPEDIFSLVGKKVLVTIEEDD | |
| | | TIMEESVENHGKKIKS | |

[0072] Ungulate animals and offspring thereof comprising at least one modified chromosomal sequence in at least one gene encoding an ANP32 protein are provided.

[0073] Ungulate cells comprising at least one modified chromosomal sequence in at least one gene encoding an ANP32 protein are also provided.

[0074] The modified chromosomal sequences can be sequences that are altered such that an ANP32 protein function as it relates to influenza A infection is impaired, reduced, or eliminated. Thus, animals and cells described herein can be referred to as “knock-out” animals or cells.

[0075] The modified chromosomal sequence in the gene encoding the ANP32 protein reduces the susceptibility of the animal, offspring, or cell to infection by a pathogen, as compared to the susceptibility of an animal, offspring, or cell that does not comprise the modified chromosomal sequence in the gene encoding the ANP32 protein to infection by the pathogen.

[0076] The modification preferably substantially eliminates susceptibility of the animal, offspring, or cell to the pathogen. The modification more preferably completely eliminates susceptibility of the animal, offspring, or cell to the pathogen, such that animals do not show any clinical signs of disease following exposure to the pathogen.

[0077] For example, where the animal is a porcine animal and the pathogen is influenza A, porcine animals having the modification do not show any clinical signs of influenza A (e.g., fever, lethargy, anorexia, weight loss, nasal and ocular discharge, cough, sneezing, conjunctivitis, and/or breathing difficulties) following exposure to influenza A. In addition, in porcine animals having the modification, influenza A nucleic acid cannot be detected in the nasal secretions, feces, or serum; influenza antigen cannot be detected in the tissues of the animal (e.g., in lung tissue), and serum is negative for influenza-specific antibody.

[0078] Similarly, cells having the modification that are exposed to the pathogen do not become infected with the pathogen.

[0079] The pathogen can comprise a virus. For example, the virus can comprise an Orthomyxoviridae family virus.

[0080] The virus can comprise an influenza virus, and preferably comprises a type A influenza virus. The type A influenza virus can comprise an H1N1 subtype virus, an H1N2 subtype virus, or an H3N2 subtype influenza A virus.

[0081] For any of the ungulate animals or offspring described herein, the animal or offspring can be an embryo, a juvenile, or an adult.

[0082] Similarly, the cell can comprise an embryonic cell, a cell derived from a juvenile animal, or a cell derived from an adult animal.

[0083] For example, the cell can comprise an embryonic cell.

[0084] The cell can comprise a cell derived from a juvenile animal.

[0085] Any of the animals, offspring, or cells can be heterozygous for the modified chromosomal sequence in the gene encoding the ANP32 protein. Animals, offspring, and cells that are heterozygous for the modified chromosomal sequence in the gene encoding the ANP32 protein include animals, offspring, and cells that have a modified chromosomal sequence in one allele of a gene encoding the ANP32 protein and no modified chromosomal sequence in the other allele of the gene encoding the ANP32 protein. Animals, offspring, and cells that are heterozygous for the modified chromosomal sequence in the gene encoding the ANP32 protein include animals also include animals, offspring, and cells having a modified chromosomal sequence in one allele of a gene encoding the ANP32 protein and a different modified chromosomal sequence in the other allele of the gene encoding the ANP32 protein.

[0086] Alternatively, the animal, offspring, or cell can be homozygous for the modified chromosomal sequence in the gene encoding the ANP32 protein. Animals, offspring, or cells that are homozygous for the modified chromosomal sequence in the gene encoding the ANP32 protein have the same modified chromosomal sequence in both alleles of the gene.

[0087] The modified chromosomal sequence can comprise any alteration in the nucleotide sequence of the gene encoding the ANP32 protein. For example, the modified chromosomal sequence can comprise a substitution, an insertion, a frameshift, a deletion, an inversion, a translocation, a duplication, a splice-donor site alteration, or a combination of any thereof.

[0088] Thus, for example, in any of the animals, offspring, or cells, the modified chromosomal sequence can comprise a deletion in the gene encoding the ANP32 protein, an insertion in the gene encoding the ANP32 protein, a substitution in the gene encoding the ANP32 protein, or a combination of any thereof.

[0089] For example, the modified chromosomal sequence can comprise a deletion in the gene encoding the ANP32 protein.

[0090] The deletion can comprise an in-frame deletion.

[0091] The deletion can result in deletion of the entire coding sequence of the gene encoding the ANP32 protein.

[0092] The deletion can comprise a deletion of the start codon of the gene encoding the ANP32 protein.

[0093] The modified chromosomal sequence can comprise an insertion in the gene encoding the ANP32 protein.

[0094] The modified chromosomal sequence can comprise a substitution in the gene encoding the ANP32 protein.

[0095] The deletion, the insertion, and/or the substitution can result in a miscoding in the gene encoding the ANP32 protein.

[0096] Where the ungulate animal, offspring, or cell comprises a deletion in the gene encoding the ANP32 protein, an insertion in the gene encoding the ANP32 protein, and/or a substitution in the gene encoding the ANP32, the deletion, the insertion, and/or the substitution can result in introduction of a premature stop codon into the gene encoding the ANP32 protein. In some configurations, the edited site resulting in a premature stop codon can comprise SEQ ID NO: 7577 or SEQ ID NO: 7578.

[0097] In any of the animals, offspring, or cells, the modified chromosomal sequence in the gene encoding the ANP32 protein can comprise a modified chromosomal sequence in a gene encoding an ANP32A protein.

[0098] Where the animal, offspring, or cell comprises a modified chromosomal sequence in a gene encoding an ANP32A protein, the ANP32A protein can comprise an amino acid sequence having at least 80% sequence identity to SEQ ID NO: 6 or 7.

[0099] For example, the ANP32A protein can comprise an amino acid sequence having at least 85% sequence identity to SEQ ID NO: 6 or 7.

[0100] The ANP32A protein can comprise an amino acid sequence having at least 90% sequence identity to SEQ ID NO: 6 or 7.

[0101] The ANP32A protein can comprise an amino acid sequence having at least 95% sequence identity to SEQ ID NO: 6 or 7.

[0102] The ANP32A protein can comprise an amino acid sequence having at least 98% sequence identity to SEQ ID NO: 6 or 7.

[0103] The ANP32A protein can comprise an amino acid sequence having at least 99% sequence identity to SEQ ID NO: 6 or 7.

[0104] The ANP32A protein can comprise an amino acid sequence having at least 99.5% sequence identity to SEQ ID NO: 6 or 7.

[0105] For example, the ANP32A protein can comprise an amino acid sequence having at least 80%, at least 85%, at least 90%, at least 95%, at least 98%, at least 99%, or at least 99.5% sequence identity to SEQ ID NO: 6.

[0106] In any of the animals, offspring or cells, the modified chromosomal sequence in the gene encoding the ANP32A protein can result in introduction of a premature stop codon into the gene encoding the ANP32A protein. The premature stop codon can be upstream of the sequence in the gene encoding the ANP32A protein that codes for asparagine 129 (N129) and aspartic acid 130 (D130) of SEQ ID NO: 6 or asparagine 139 (N139) and aspartic acid 130 (D130) of SEQ ID NO: 7. The premature stop codon can be part of a sequence comprising SEQ ID NO: 7577.

[0107] In any of the animals, offspring or cells, the modified chromosomal sequence can comprise a modification in exon 1, exon 2, exon 3, or exon 4 of the gene encoding the ANP32A protein.

[0108] Alternatively or in addition, the modified chromosomal sequence can comprise a modification in an intron that is contiguous with any of exon 1, exon 2, exon 3, or exon 4 of the gene encoding the ANP32A protein.

[0109] For example, the modified chromosomal sequence can comprise a modification in exon 2 of the gene encoding the ANP32A protein, exon 3 of the gene encoding the ANP32A protein, or a sequence spanning an intron-exon junction between intron 1 and exon 2 of the gene encoding the ANP32A protein.

[0110] Alternatively or in addition, the modified chromosomal sequence can comprise a modification in exon 4 of the gene encoding the ANP32A protein.

[0111] In any of the animals, offspring or cells, the modified chromosomal sequence can comprise a modification within the region comprising nucleotides 29,400 through 31,996 of SEQ ID NO: 3.

[0112] For example, the modified chromosomal sequence can comprise a modification within the region comprising nucleotides 29,400 through 29,580 of SEQ ID NO: 3.

[0113] The modified chromosomal sequence can comprise a modification within the region comprising nucleotides 29,719 through 29,841 of SEQ ID NO: 3.

[0114] The modified chromosomal sequence can comprise a modification within the region comprising nucleotides 31,798 through 31,996 of SEQ ID NO: 3.

[0115] The modified chromosomal sequence can comprise a modification within the region comprising nucleotides 31,855 through 31,860 of SEQ ID NO: 3. Nucleotides 31,855 through 31,860 of SEQ ID NO: 3 encode N129 and D130 of the ANP32A protein of SEQ ID NO: 6.

[0116] For example, the modified chromosomal sequence can comprise a substitution of one or more nucleotides within the region comprising nucleotides 31,855 through 31,860 of SEQ ID NO: 3 with a different nucleotide, resulting in a codon that encodes a different amino acid.

[0117] Alternatively or in addition, the modification can result in an in-frame deletion of a codon within the region comprising nucleotides 31,855 through 31,860 of SEQ ID NO: 3.

[0118] In any of the animals, offspring, or cells, the modification can result in substitution of the asparagine at position 129 (N129) of SEQ ID NO: 6 or the asparagine at position 139 (N139) of SEQ ID NO: 7 with a different amino acid.

[0119] For example, the modification can result in substitution of the asparagine at position 129 (N129) of SEQ ID NO: 6 or the asparagine at position 139 (N139) of SEQ ID NO: 7 with a glycine (G), alanine (A), serine (S), threonine (T), cysteine (C), valine (V), leucine (L), isoleucine (I), methionine (M), proline (P), phenylalanine (F), tyrosine (Y), tryptophan (W), aspartic acid (D), glutamic acid (E), glutamine (Q), histidine (H), lysine (K), or arginine (R) residue.

[0120] The modification can result in substitution of the asparagine at position 129 (N129) of SEQ ID NO: 6 or the asparagine at position 139 (N139) of SEQ ID NO: 7 with a glycine (G), isoleucine (I), valine (V), proline (P), tryptophan (W), aspartic acid (D), glutamic acid (E), glutamine (Q), histidine (H), lysine (K), or arginine (R) residue.

[0121] For instance, the modification can result in substitution of the asparagine at position 129 (N129) of SEQ ID NO:6 or the asparagine at position 139 (N139) of SEQ ID NO: 7 with an isoleucine (I) residue.

[0122] In any of the animals, offspring, or cells, the modification can result in substitution of the aspartic acid at position 130 (D130) of SEQ ID NO: 6 or the aspartic acid at position 140 (D140) of SEQ ID NO: 7 with a different amino acid.

[0123] For example, the modification can result in substitution of the aspartic acid at position 130 (D130) of SEQ ID NO: 6 or the aspartic acid at position 140 (D140) of SEQ ID NO: 7 with a glycine (G), alanine (A), serine (S), threonine (T), cysteine (C), valine (V), leucine (L), isoleucine (I), methionine (M), proline (P), phenylalanine (F), tyrosine (Y), tryptophan (W), glutamic acid (E), asparagine (N), glutamine (Q), histidine (H), lysine (K), or arginine (R) residue.

[0124] The modification can result in substitution of the aspartic acid at position 130 (D130) of SEQ ID NO: 6 or the aspartic acid at position 140 (D140) of SEQ ID NO: 7 with an alanine (A), asparagine (N), valine (V), leucine (L), isoleucine (I), methionine (M), proline (P), phenylalanine (F), tyrosine (Y), tryptophan (W), glutamine (Q), histidine (H), lysine (K), or arginine (R) residue.

[0125] For instance, the modification can result in substitution of the aspartic acid at position 130 (D130) of SEQ ID NO: 6 or the aspartic acid at position 140 (D140) of SEQ ID NO: 7 with an alanine (A) or asparagine (N) residue.

[0126] In any of the animals, offspring, or cells, the modification can result in substitution of the asparagine at position 129 (N129) of SEQ ID NO: 6 or the asparagine at position 139 (N139) of SEQ ID NO: 7 with an isoleucine (I) residue and substitution of the aspartic acid at position 130 (D130) of SEQ ID NO: 6 or the aspartic acid at position 140 (D140) of SEQ ID NO: 7 with an alanine (A) or asparagine (N) residue.

[0127] In any of the animals, offspring or cells, the modified chromosomal sequence can comprise a modification in exon 3.

[0128] In any of the animals, offspring or cells, modified chromosomal sequence can comprise a modification within the region comprising nucleotides 29,830 through 29,832 of SEQ ID NO: 3. Nucleotides 29,830 through 29,832 of SEQ ID NO: 3 encode valine 106 (V106) of the ANP32A protein of SEQ ID NO: 6.

[0129] For example, the modified chromosomal sequence can comprise a substitution of one or more nucleotides within the region comprising nucleotides 29,830 through 29,832 of SEQ ID NO: 3 with a different nucleotide, resulting in a codon that encodes a different amino acid.

[0130] Alternatively, the modification can result in deletion of a codon at nucleotides 29,830 through 29,832 of SEQ ID NO: 3.

[0131] In any of the animals, offspring, or cells, the modification can result in substitution of the valine at position 106 (V106) of SEQ ID NO: 6 or the valine at position 116 of SEQ ID NO: 7 with a different amino acid.

[0132] For example, the modification can result in substitution of the valine at position 106 (V106) of SEQ ID NO: 6 or the valine at position 116 of SEQ ID NO: 7 with a glycine (G), alanine (A), serine (S), threonine (T), cysteine (C), leucine (L), isoleucine (I), methionine (M), proline (P), phenylalanine (F), tyrosine (Y), tryptophan (W), aspartic acid (D), glutamic acid (E), asparagine (N), glutamine (Q), histidine (H), lysine (K), or arginine (R) residue.

[0133] The modification can result in substitution of the valine at position 106 (V106) of SEQ ID NO: 6 or the valine at position 116 of SEQ ID NO: 7 with an isoleucine (I) residue.

[0134] In any of the animals, offspring, or cells, the modified chromosomal sequence can comprise a modification within the region comprising nucleotides 31,936 through 31,938 of SEQ ID NO: 3. Nucleotides 31,936 through 31,938 of SEQ ID NO: 3 encode serine 156 (S156) of the ANP32A protein of SEQ ID NO: 6.

[0135] For example, the modified chromosomal sequence can comprise a substitution of one or more nucleotides within the region comprising nucleotides 31,936 through 31,938 of SEQ ID NO: 3 with a different nucleotide, resulting in a codon that encodes a different amino acid.

[0136] Alternatively, the modification can result in deletion of a codon at nucleotides 31,936 through 31,938 of SEQ ID NO: 3.

[0137] In any of the animals, offspring, or cells, the modification can result in substitution of the serine at position 156 (S156) of SEQ ID NO: 6 or the serine at position 166 (S166) of SEQ ID NO: 7 with a different amino acid.

[0138] For example, the modification can result in substitution of the serine at position 156 (S156) of SEQ ID NO: 6 or the serine at position 166 (S166) of SEQ ID NO: 7 with a glycine (G), alanine (A), threonine (T), cysteine (C), valine (V), leucine (L), isoleucine (I), methionine (M), proline (P), phenylalanine (F), tyrosine (Y), tryptophan (W), aspartic acid (D), glutamic acid (E), asparagine (N), glutamine (Q), histidine (H), lysine (K), or arginine (R) residue.

[0139] The modification can result in substitution of the serine at position 156 (S156) of SEQ ID NO: 6 or the serine at position 166 (S166) of SEQ ID NO: 7 with a proline (P) residue.

[0140] In any of the animals, offspring, or cells, the modified chromosomal sequence in the gene encoding the ANP32 protein can comprise a modified chromosomal sequence in a gene encoding an ANP32B protein.

[0141] Where the animal, offspring, or cell comprises a modified chromosomal sequence in a gene encoding an ANP32B protein, the ANP32B protein can comprise an amino acid sequence having at least 80% sequence identity to any one of SEQ ID NOs. 8-14.

[0142] For example, the ANP32B protein can comprise an amino acid sequence having at least 90% sequence identity to any one of SEQ ID NOs. 8-14.

[0143] The ANP32B protein can comprise an amino acid sequence having at least 95% sequence identity to any one of SEQ ID NOs. 8-14.

[0144] The ANP32B protein can comprise an amino acid sequence having at least 98% sequence identity to any one of SEQ ID NOs. 8-14.

[0145] The ANP32B protein can comprise an amino acid sequence having at least 99% sequence identity to any one of SEQ ID NOs. 8-14.

[0146] The ANP32B protein can comprise an amino acid sequence having at least 99.5% sequence identity to any one of SEQ ID NOs. 8-14.

[0147] For example, the ANP32B protein ca n comprise an amino acid sequence having at least 80%, at least 90%, at least 95%, at least 98%, at least 99%, or at least 99.5% sequence identity to any one of SEQ ID NOs. 8-10.

[0148] In any of the animals, offspring, or cells, the modified chromosomal sequence in the gene encoding the ANP32B protein can result in introduction of a premature stop codon into the gene encoding the ANP32B protein. The premature stop codon can be upstream of the sequence in the gene encoding the ANP32B protein that codes for asparagine 129 (N129) and aspartic acid 130 (D130) of SEQ ID NO: 8, 9, or 10. The premature stop codon can be part of a sequence comprising SEQ ID NO: 7578.

[0149] In any of the animals, offspring, or cells, the modified chromosomal sequence can comprise a modification in exon 1, exon 2, exon 3, or exon 4 of the gene encoding the ANP32B protein.

[0150] Alternatively or in addition, the modified chromosomal sequence can comprise a modification in an intron that is contiguous with any of exon 1, exon 2, exon 3, or exon 4 of the gene encoding the ANP32B protein.

[0151] For example, the modified chromosomal sequence can comprise a modification in exon 2 of the gene encoding the ANP32B protein, exon 3 of the gene encoding the ANP32B protein, or a sequence spanning an intron-exon junction between exon 3 and intron 3 of the gene encoding the ANP32B protein.

[0152] Alternatively or in addition, the modified chromosomal sequence can comprise a modification in exon 4.

[0153] In any of the animals, offspring, or cells, the modified chromosomal sequence can comprise a modification within the region comprising nucleotides 10,823 through 20,342 of SEQ ID NO: 5.

[0154] For example, the modified chromosomal sequence can comprise a modification within the region comprising nucleotides 10,823-10,972 of SEQ ID NO: 5.

[0155] The modified chromosomal sequence can comprise a modification within the region comprising nucleotides 14,272-14,415 of SEQ ID NO: 5.

[0156] The modified chromosomal sequence can comprise a modification within the region comprising nucleotides 20,153-20,342 of SEQ ID NO: 5.

[0157] The modified chromosomal sequence can comprise a modification within the region comprising nucleotides 20,211 through 20,216 of SEQ ID NO: 5. Nucleotides through 20,216 of SEQ ID NO: 5 encode N129 and D130 of the ANP32B protein of SEQ ID NO: 8.

[0158] For example, the modified chromosomal sequence can comprise a substitution of one or more nucleotides within the region comprising nucleotides 20,211 through 20,216 of SEQ ID NO: 5 with a different nucleotide, resulting in a codon that encodes a different amino acid.

[0159] Alternatively or in addition, the modification can result in an in-frame deletion of a codon within the region comprising nucleotides 20,211 through 20,216 of SEQ ID NO: 5.

[0160] In any of the animals, offspring, or cells, the modification can result in substitution of the asparagine at position 129 (N129) of SEQ ID NO: 8, 9, or 10 with a different amino acid.

[0161] For example, the modification can result in substitution of the asparagine at position 129 (N129) of SEQ ID NO: 8, 9, or 10 with a glycine (G), alanine (A), serine (S), threonine (T), cysteine (C), valine (V), leucine (L), isoleucine (I), methionine (M), proline (P), phenylalanine (F), tyrosine (Y), tryptophan (W), aspartic acid (D), glutamic acid (E), glutamine (Q), histidine (H), lysine (K), or arginine (R) residue.

[0162] The modification can result in substitution of the asparagine at position 129 (N129) of SEQ ID NO: 8, 9, or 10 with a glycine (G), isoleucine (I), valine (V), proline (P), tryptophan (W), aspartic acid (D), glutamic acid (E), glutamine (Q), histidine (H), lysine (K), or arginine (R) residue.

[0163] The modification can result in substitution of the asparagine at position 129 (N129) of SEQ ID NO: 8, 9, or 10 with an isoleucine (I) residue.

[0164] In any of the animals, offspring, or cells, the modification can result in substitution of the aspartic acid at position 130 (D130) of SEQ ID NO: 8, 9, or 10 with a different amino acid.

[0165] For example, the modification can result in substitution of the aspartic acid at position 130 (D130) of SEQ ID NO: 8, 9, or 10 with a glycine (G), alanine (A), serine (S), threonine (T), cysteine (C), valine (V), leucine (L), isoleucine (I), methionine (M), proline (P), phenylalanine (F), tyrosine (Y), tryptophan (W), glutamic acid (E), asparagine (N), glutamine (Q), histidine (H), lysine (K), or arginine (R) residue.

[0166] The modification can result in substitution of the aspartic acid at position 130 (D130) of SEQ ID NO: 8, 9, or 10 with an alanine (A), asparagine (N), valine (V), leucine (L), isoleucine (I), methionine (M), proline (P), phenylalanine (F), tyrosine (Y), tryptophan (W), glutamine (Q), histidine (H), lysine (K), or arginine (R) residue.

[0167] The modification can result in substitution of the aspartic acid at position 130 (D130) of SEQ ID NO: 8, 9, or 10 with an alanine (A) or asparagine (N) residue.

[0168] In any of the animals, offspring, or cells, the modification can in substitution of the asparagine at position 129 (N129) of SEQ ID NO: 8, 9, or 10 with an isoleucine (I) residue and substitution of the aspartic acid at position 130 (D130) of SEQ ID NO: 8, 9, or 10 with an alanine (A) or asparagine (N) residue.

[0169] In any of the animals, offspring, or cells, the animal, offspring, or cell can have modified chromosomal sequences in both the gene encoding the ANP32A protein and the gene encoding the ANP32B protein. Thus, the at least one modified chromosomal sequence in the gene encoding the ANP32 protein can comprise a modified chromosomal sequence in a gene encoding an ANP32A protein and a modified chromosomal sequence in a gene encoding an ANP32B protein. The modified chromosomal sequences can comprise any of the modified chromosomal sequences described herein.

[0170] In any of the animals, offspring, or cells, the modified chromosomal sequence in the gene encoding the ANP32 protein preferably causes production or activity of the ANP32 protein to be reduced, as compared to the production or activity of the same ANP32 protein in an animal, offspring, or cell that lacks the modified chromosomal sequence in the gene encoding the ANP32 protein.

[0171] Preferably, the modified chromosomal sequence in the gene encoding the ANP32 protein results in production of substantially no functional ANP32A and/or ANP32B protein by the animal, offspring, or cell. By “substantially no functional ANP32A and/or ANP32B protein,” it is meant that the level of ANP32A and/or ANP32B protein in the animal, offspring, or cell is undetectable, or if detectable, is at least about 90% lower, preferably at least about 95% lower, more preferably at least about 98%, lower, and even more preferably at least about 99% lower than the level observed in an animal, offspring, or cell that does not comprise the modified chromosomal sequence.

[0172] For any of the animals, offspring, or cells described herein, the animal, offspring, or cell preferably does not produce ANP32A and/or ANP32B protein.

[0173] In any of the animals, offspring, or cells described herein, the modified chromosomal sequence can disrupt an intron-exon splice region. Disruption of an intron-exon splice region can result in exon skipping or intron inclusion due to lack of splicing downstream of the intron-exon splice region, as well as additional downstream exons in the resulting mRNA.

[0174] In order to disrupt an intron-exon splice region, any nucleotide that is required for splicing can be altered. For example, most introns end in the sequence “AG.” If the guanine (G) residue in this sequence is replaced with a different base, the splice will not occur at this site and will instead occur at the next downstream AG dinucleotide.

[0175] Intron-exon splice regions can also be disrupted by modifying the sequence at the beginning of the intron. Most introns begin with the consensus sequence RRGTRRRY, where “R” is any purine and “Y” is any pyrimidine. If the guanine (G) residue in this sequence is modified and/or if two or more of the other bases are modified, the intron can be rendered non-functional and will not splice.

[0176] Intron-exon splice regions can also be disrupted by any other methods known in the art.

[0177] In any of the animals, offspring, or cells described herein, the modified chromosomal sequence in the gene encoding the ANP32 protein can consist of the insertion, deletion, or substitution in the gene encoding the ANP32 protein.

[0178] In any of the animals, offspring, or cells described herein, the animal, offspring or cell can comprise a chromosomal sequence having at least 80% sequence identity to SEQ ID NO: 2, 3, 4, or 5 in the regions outside of the insertion, the deletion, or the substitution.

[0179] The animal, offspring or cell can comprise a chromosomal sequence having at least 85% sequence identity to SEQ ID NO: 2, 3, 4, or 5 in the regions outside of the insertion, the deletion, or the substitution.

[0180] The animal, offspring or cell can comprise a chromosomal sequence having at least 90% sequence identity to SEQ ID NO: 2, 3, 4, or 5 in the regions outside of the insertion, the deletion, or the substitution.

[0181] The animal, offspring or cell can comprise a chromosomal sequence having at least 95% sequence identity to SEQ ID NO: 2, 3, 4, or 5 in the regions outside of the insertion, the deletion, or the substitution.

[0182] The animal, offspring or cell can comprise a chromosomal sequence having at least 98% sequence identity to SEQ ID NO: 2, 3, 4, or 5 in the regions outside of the insertion, the deletion, or the substitution.

[0183] The animal, offspring or cell can comprise a chromosomal sequence having at least 99% sequence identity to SEQ ID NO: 2, 3, 4, or 5 in the regions outside of the insertion, the deletion, or the substitution.

[0184] The animal, offspring or cell can comprise a chromosomal sequence having at least 99.9% sequence identity to SEQ ID NO: 2, 3, 4, or 5 in the regions outside of the insertion, the deletion, or the substitution.

[0185] The animal, offspring or cell can comprise a chromosomal sequence having 100% sequence identity to SEQ ID NO: 2, 3, 4, or 5 in the regions outside of the insertion, the deletion, or the substitution.

### Genetically Edited Animals and Cells

[0186] Any of the animals or offspring described herein can be genetically edited animals or offspring.

[0187] Likewise, any of the cells described herein can be genetically edited cells.

[0188] The animal, offspring, or cell can be an animal, offspring, or cell that has been genetically edited using a homing endonuclease. The homing endonuclease can be a naturally occurring endonuclease but is preferably a rationally designed, non-naturally occurring homing endonuclease that has a DNA recognition sequence that has been designed so that the endonuclease targets a chromosomal sequence in a gene encoding an ANP32 protein. Thus, the homing endonuclease can be a designed homing endonuclease.

[0189] The homing endonuclease can comprise, for example, a Clustered Regularly Interspaced Short Palindromic Repeats (CRISPR) system, a Transcription Activator-Like Effector Nuclease (TALEN), a Zinc Finger Nuclease (ZFN), a recombinase fusion protein, a meganuclease, or a combination of any thereof.

[0190] The homing nuclease preferably comprises a CRISPR system. Examples of CRISPR systems that can be used to create the female porcine animals for use in the methods described herein include, but are not limited to CRISPR/Cas9, CRISPR/Cas5, CRISPR/Cas6, and CRISPR/Cas12.

[0191] The use of various homing endonucleases, including CRISPR systems and TALENs, to generate genetically edited animals is discussed further hereinbelow.

[0192] The edited chromosomal sequence may be (1) inactivated, (2) modified, or (3) comprise an integrated sequence. Where the edited chromosomal sequence is in an ANP32 gene, a chromosomal sequence is altered such that an ANP32 protein function as it relates to type A influenza infection is impaired, reduced, or eliminated. Thus, a genetically edited animal comprising an inactivated chromosomal sequence may be termed a “knock out” or a “conditional knock out.” Similarly, a genetically edited animal comprising an integrated sequence may be termed a “knock in” or a “conditional knock in.” Furthermore, a genetically edited animal comprising a modified chromosomal sequence may comprise one or more targeted base pair alteration(s) or other modification(s) such that an altered protein product is produced. Briefly, the process can comprise introducing into an embryo or cell at least one RNA molecule encoding a targeted zinc finger nuclease and, optionally, at least one accessory polynucleotide. The process further comprises incubating the embryo or cell to allow expression of the zinc finger nuclease, wherein a double-stranded break introduced into the targeted chromosomal sequence by the zinc finger nuclease is repaired by an error-prone non-homologous end-joining DNA repair process or a homology-directed DNA repair process. The process of editing chromosomal sequences encoding a protein associated with germline development using targeted zinc finger nuclease technology is rapid, precise, and highly efficient.

[0193] Alternatively, the process can comprise using a CRISPR system (e.g., a CRISPR/Cas9 system) to modify the genomic sequence. To use Cas9 to modify genomic sequences, the protein can be delivered directly to a cell. Alternatively, an mRNA that encodes Cas9 can be delivered to a cell, or a gene that provides for expression of an mRNA that encodes Cas9 can be delivered to a cell. In addition, either target-specific crRNA and a tracrRNA can be delivered directly to a cell or target-specific sgRNA(s) can be to a cell (these RNAs can alternatively be transcribed from a plasmid constructed to encode the RNAs). Selection of target sites and designed of crRNA/gRNA are well known in the art. A discussion of construction and cloning of gRNAs can be found at http://www(dot)genome-engineering(dot)org/crispr/wp-content/uploads/2014/05/CRISPR-Reagent-Description-Rev20140509.pdf.

[0194] At least one ANP32 locus can be used as a target site for the site-specific editing. The site-specific editing can include insertion of an exogenous nucleic acid (e.g., a nucleic acid comprising a nucleotide sequence encoding a polypeptide of interest) or deletions of nucleic acids from the locus. For example, integration of the exogenous nucleic acid and/or deletion of part of the genomic nucleic acid can modify the locus so as to produce a disrupted ANP32 gene, resulting in reduced activity of ANP32 protein.

[0195] Thus, for example, any of the animals or cells can be an animal or cell that has been genetically edited using a Clustered Regularly Interspaced Short Palindromic Repeats (CRISPR)/Cas system. The CRISPR/Cas system can suitably comprise any of the guide RNAs (gRNAs) described herein.

[0196] For any of the animals, offspring, or cells, the modified chromosomal sequence can be a modified chromosomal sequence that has been produced via homology directed repair (HDR).

[0197] Alternatively, the modified chromosomal sequence can be a modified chromosomal sequence that has been produced via non-homologous end-joining (NEHJ). For example, it is advantageous to identify and use guide pairs that result in the deletion of DNA sequences such that the joined ends can result in the generation of an in-frame translational stop codon across the joined ends; when the cut sites of two guides are repaired by NHEJ in an end-to-end manner, this new DNA sequence, when transcribed into mRNA and translated into protein could terminate the production of the ANP32 protein.

### Cell Types

[0198] Any of the cells described herein can comprise a germ cell or a gamete.

[0199] For example, any of the cells described herein can comprise a sperm cell.

[0200] Alternatively, any of the cells described herein can comprise an egg cell (e.g., a fertilized egg).

[0201] Any of the cells described herein can comprise a somatic cell.

[0202] For example, any of the cells described herein can comprise a fibroblast (e.g., a fetal fibroblast).

[0203] Any of the cells described herein can comprise an embryonic cell.

[0204] Any of the cells described herein can comprise a cell derived from a juvenile animal.

[0205] Any of the cells described herein can comprise a cell derived from an adult animal.

### Methods for Producing Animals

[0206] Methods for producing pathogen-resistant ungulate animals and lineages of such animals are provided.

[0207] The methods can comprise introducing into an animal cell or an oocyte or embryo an agent that specifically binds to a chromosomal target site of the cell and causes a double-stranded DNA break or otherwise inactivates or reduces activity of an ANP32 gene or protein therein using gene editing methods such as the Clustered Regularly Interspaced Short Palindromic Repeats (CRISPR)/Cas system, Transcription Activator-Like Effector Nucleases (TALENs), Zinc Finger Nucleases (ZFN), recombinase fusion proteins, or meganucleases.

[0208] Also described herein is the use of one or more particular ANP32 loci in tandem with a polypeptide capable of effecting cleavage and/or integration of specific nucleic acid sequences within the one or more ANP32 loci. Examples of the use of ANP32 loci in tandem with a polypeptide or RNA capable of effecting cleavage and/or integration of the ANP32 loci include a polypeptide selected from the group consisting of zinc finger proteins, meganucleases, TAL domains, TALENs, RNA-guided CRISPR/Cas recombinases, leucine zippers, and others known to those in the art. Particular examples include a chimeric (“fusion”) protein comprising a site-specific DNA binding domain polypeptide and cleavage domain polypeptide (e.g., a nuclease), such as a ZFN protein comprising a zinc-finger polypeptide and a FokI nuclease polypeptide. Described herein are polypeptides comprising a DNA-binding domain that specifically binds to an ANP32 gene. Such a polypeptide can also comprise a nuclease (cleavage) domain or half-domain (e.g., a homing endonuclease, including a homing endonuclease with a modified DNA-binding domain), and/or a ligase domain, such that the polypeptide may induce a targeted double-stranded break, and/or facilitate recombination of a nucleic acid of interest at the site of the break. A DNA-binding domain that targets an ANP32 locus can be a DNA-cleaving functional domain. The foregoing polypeptides can be used to introduce an exogenous nucleic acid into the genome of a host organism (e.g., an animal species) at one or more ANP32 loci. The DNA-binding domains can comprise a zinc finger protein with one or more zinc fingers (e.g., 2, 3, 4, 5, 6, 7, 8, 9 or more zinc fingers), which is engineered (non-naturally occurring) to bind to any sequence within an ANP32 gene. Any of the zinc finger proteins described herein may bind to a target site within the coding sequence of the target gene or within adjacent sequences (e.g., promoter or other expression elements). The zinc finger protein can bind to a target site in an ANP32 gene.

[0209] A method for producing an ungulate animal or a lineage of ungulate animals having reduced susceptibility to infection by a pathogen is provided. The method comprises modifying an ungulate oocyte or an ungulate sperm cell to introduce a modified chromosomal sequence in a gene encoding an ANP32 protein into at least one of the oocyte and the sperm cell, and fertilizing the oocyte with the sperm cell to create a fertilized egg containing the modified chromosomal sequence in the gene encoding the ANP32 protein. The method further comprises transferring the fertilized egg into a surrogate female ungulate animal, wherein gestation and term delivery produces a progeny animal. The method additionally comprises screening the progeny animal for susceptibility to the pathogen, and selecting progeny animals that have reduced susceptibility to the pathogen as compared to animals that do not comprise a modified chromosomal sequence in a gene encoding an ANP32 protein.

[0210] Artificial insemination can be used to fertilize the oocyte with the sperm cell.

[0211] Another method for producing an ungulate animal or a lineage of ungulate animals having reduced susceptibility to infection by a pathogen is provided. The method comprises modifying an ungulate fertilized egg to introduce a modified chromosomal sequence in a gene encoding an ANP32 protein into the fertilized egg. The method further comprises transferring the fertilized egg into a surrogate female ungulate animal, wherein gestation and term delivery produces a progeny animal. The method additionally comprises screening the progeny animal for susceptibility to the pathogen, and selecting progeny animals that have reduced susceptibility to the pathogen as compared to animals that do not comprise a modified chromosomal sequence in a gene encoding an ANP32 protein.

[0212] Yet another method for producing an ungulate animal or a lineage of ungulate animals having reduced susceptibility to infection by a pathogen is provided. The method comprises enucleating an ungulate oocyte, modifying a donor ungulate somatic cell to introduce a modified chromosomal sequence into a gene encoding an ANP32 protein, fusing the oocyte with the modified donor ungulate somatic cell, and activating the oocyte to produce an embryo. The method further comprises transferring the embryo into a surrogate female ungulate animal, wherein gestation and term delivery produces a progeny animal. The method additionally comprises screening the progeny animal for susceptibility to the pathogen, and selecting progeny animals that have reduced susceptibility to the pathogen as compared to animals that do not comprise a modified chromosomal sequence in a gene encoding an ANP32 protein.

[0213] The donor ungulate somatic cell can comprise a fibroblast (e.g., a fetal fibroblast).

[0214] A method of increasing an ungulate animal's resistance to infection with a pathogen is provided. The method comprises modifying at least one chromosomal sequence in at least one gene encoding an ANP32 protein, so that production or activity of the ANP32 protein is reduced, as compared to production or activity of the same ANP32 protein in an ungulate animal that does not comprise a modified chromosomal sequence in the gene encoding the ANP32 protein.

[0215] In any of the methods, the oocyte, sperm cell, fertilized egg, donor somatic cell, or ungulate animal can be heterozygous for the modified chromosomal sequence.

[0216] Alternatively, the oocyte, sperm cell, fertilized egg, donor somatic cell, or ungulate animal can be homozygous for the modified chromosomal sequence.

[0217] In any of the methods, the step of modifying the at least one chromosomal sequence in the gene encoding the ANP32 protein can comprise genetic editing of the chromosomal sequence.

[0218] The genetic editing can comprise use of a homing endonuclease. The homing endonuclease can be a naturally occurring endonuclease but is preferably a rationally designed, non-naturally occurring homing endonuclease that has a DNA recognition sequence that has been designed so that the endonuclease targets a chromosomal sequence in a gene encoding an ANP32 protein. Thus, the homing endonuclease can be a designed homing endonuclease.

[0219] The homing endonuclease can comprise, for example, a Clustered Regularly Interspaced Short Palindromic Repeats (CRISPR) system, a Transcription Activator-Like Effector Nuclease (TALEN), a Zinc Finger Nuclease (ZFN), a recombinase fusion protein, a meganuclease, or a combination of any thereof.

[0220] The homing nuclease preferably comprises a CRISPR/Cas system. Examples of CRISPR systems that include, but are not limited to CRISPR/Cas9, CRISPR/Cas5, CRISPR/Cas6, and CRISPR/Cas12.

[0221] The CRISPR/Cas system can comprise a gRNA comprising a sequence that is complementary to a sequence of a gene encoding an ANP32A protein.

[0222] For example, the gRNA can comprise a sequence that is complementary to: (1) a sequence within exon 1, exon 2, or exon 3, or exon 4 of the gene encoding the ANP32A protein; (2) a sequence within an intron that is contiguous with any of exon 1, exon 2, exon 3, and exon 4 of the gene encoding the ANP32A protein; or (3) a sequence spanning an intron-exon junction between any of exon 1, exon 2, exon 3, and exon 4 and a contiguous intron.

[0223] Illustrative nucleic acid sequences for gRNAs that are complementary to a sequence of a gene encoding an ANP32A protein provided hereinbelow in Table 6 (SEQ ID NOs. 15-41). Additional nucleic acid sequences for gRNAs that are complementary to a sequence of a gene encoding an ANP32A protein are provided in the sequence listing as SEQ ID NOs. 61-5,109.

[0224] Thus, where the CRISPR/Cas9 system comprises a gRNA comprising a sequence that is complementary to a sequence of a gene encoding an ANP32A protein, the nucleic acid sequence of the gRNA can comprise any one of SEQ ID NOs. 15-41 and 61-5,109. For example, the nucleic acid sequence of the gRNA can comprise any one of SEQ ID NOs. 15-41. The sequence can also comprise a pair of gRNAs targeting ANP32A. For example, SEQ ID NOs: 26 and 19, SEQ ID NOs: 33 and 36, SEQ ID NOs: 33 and 40, SEQ ID NOs: 15 and 22, SEQ ID NOs: 15 and 23, SEQ ID NOs: 16 and 24, and SEQ ID NOs: 17 and 24.

[0225] The CRISPR/Cas system can comprise a gRNA comprising a sequence that is complementary to a sequence of a gene encoding an ANP32B protein.

[0226] For example, the gRNA can comprise a sequence that is complementary to: (1) a sequence within exon 1, exon 2, exon 3, or exon 4 of the gene encoding the ANP32B protein; (2) a sequence within an intron that is contiguous with any of exon 1, exon 2, exon 3, and exon 4 of the gene encoding the ANP32B protein; or (3) a sequence spanning an intron-exon junction between any of exon 1, exon 2, exon 3, and exon 4 and a contiguous intron.

[0227] Illustrative nucleic acid sequences for gRNAs that are complementary to a sequence of a gene encoding an ANP32A protein provided hereinbelow in Table 7 (SEQ ID NOs. 42-60). Additional nucleic acid sequences for gRNAs that are complementary to a sequence of a gene encoding an ANP32B protein are provided in the sequence listing as SEQ ID NOs. 5,110-7,576.

[0228] Thus, where the CRISPR/Cas9 system comprises a gRNA comprising a sequence that is complementary to a sequence of a gene encoding an ANP32B protein, the nucleic acid sequence of the gRNA can comprise any one of SEQ ID NOs. 42-60 and 5,110-7,576. For example, the nucleic acid sequence of the gRNA can comprise any one of SEQ ID NOs. 42-60.

[0229] Alternatively or in addition, the CRISPR/Cas9 system can comprise a pair of gRNAs targeted to an ANP32B gene. For example, the pair of gRNAs can comprise SEQ ID NOs: 44 and 46, SEQ ID NOs: 55 and 58, or SEQ ID NOs: 55 and 59.

[0230] In any of the methods, involving the use of a CRISPR/Cas system, the sequence of the gene encoding the ANP32A protein or the sequence of the gene encoding the ANP32B protein suitably comprises a protospacer adjacent motif (PAM). The PAM can comprise the sequence nGG, wherein n is any nucleotide.

[0231] In any of the methods, involving the use of a CRISPR/Cas system, the CRISPR/Cas system can comprise a Cas9 nuclease (e.g., a Streptococcus pyogenes Cas9 endonuclease).

[0232] In any of the methods described herein, the ungulate animal can comprise a porcine animal or a bovine animal. For example, the ungulate animal can comprise a porcine animal.

[0233] Any of the methods described herein can produce any of the animals described herein or any of the ungulate cells described herein.

[0234] Any of the methods described herein can further comprise using the animal as a founder animal.

### Populations of Animals

[0235] Populations of animals described herein are also provided.

[0236] A population of ungulate animals is provided. The population comprises two or more of any of the ungulate animals and/or offspring thereof described herein.

[0237] Another population of animals is provided. The population comprises two or more ungulate animals made by any of the methods described herein, and/or offspring thereof.

[0238] The populations of animals are resistant to infection by a pathogen.

[0239] The pathogen can comprise a virus. For example, the pathogen can comprise an influenza virus (e.g., a type A influenza virus).

### Guide RNAs

[0240] Guide RNAs (gRNAs) are provided. The gRNAs have a nucleic acid sequence that is complementary to a sequence of a gene encoding an ANP32 protein and can be used to introduce a chromosomal modification into a gene encoding an ANP32 protein.

[0241] Illustrative gRNA sequences complementary to a sequence of a gene encoding an ANP32A protein or a gene encoding an ANP32B protein are provided in Tables 6 and 7 below. The numbering and strandedness of the gRNA sequences provided in Tables 6 and 7 correspond to the numbering and strandedness of SEQ ID NO: 3 (for the ANP32A gRNAs provided in Table 6) and SEQ ID NO: 5 (for the ANP32B gRNAs provided in Table 7). A “1” in the “strand” column in Tables 6 and 7 indicates that the sequence of the gRNA is a sequence that is found on the same strand as the strand for which the nucleic acid sequence is provided in SEQ ID NO: 3 or 5, whereas a “−1” in the “strand” column indicates that the sequence of the gRNA is on the opposing strand. The “position” listed in Tables 6 and 7 is the predicted nuclease cut site, according to the nucleotide numbering of SEQ ID NOs. 3 and 5.

[0242] Tables 6 and 7 also provide the PAM sequence found in the sequence of the gene encoding the ANP32 protein. Although the sequences shown in Table 6 and 7 are listed with DNA nucleotides, a person of ordinary skill would understand that the sequences are in fact RNA sequences and would be readily able to convert the DNA sequences into RNA sequences.

TABLE 6
Illustrative ANP32A gRNA sequences

| SEQ ID NO. | Position | Strand | Sequence | PAM | Location |
|---|---|---|---|---|---|
| 15 | 29419 | −1 | ttcacctggaaagacaaggc | cgg | intron 1 |
| 16 | 29423 | −1 | ctctttcacctggaaagaca | agg | intron 1 |
| 17 | 29426 | 1 | cacgccggccttgtctttcc | agg | intron 1 |
| 18 | 29433 | −1 | ccaggacgagctctttcacc | tgg | exon 2 |
| 19 | 29444 | 1 | ccaggtgaaagagctcgtcc | tgg | exon 2 |
| 20 | 29451 | −1 | catttgaccgacaattgtcc | agg | exon 2 |
| 21 | 29455 | 1 | agctcgtcctggacaattgt | cgg | exon 2 |
| 22 | 29466 | 1 | gacaattgtcggtcaaatga | agg | exon 2 |
| 23 | 29478 | 1 | tcaaatgaaggcaagattga | agg | exon 2 |
| 24 | 29490 | −1 | gttcttcaaattcatctgtg | agg | exon 2 |
| 25 | 29504 | 1 | cacagatgaatttgaagaac | tgg | exon 2 |
| 26 | 29529 | 1 | ttcttgagtacaatcaatgt | agg | exon 2 |
| 27 | 29541 | −1 | gtaagtttgcgactgaggtg | agg | exon 2 |
| 28 | 29546 | −1 | ctttggtaagtttgcgactg | agg | exon 2 |
| 29 | 29563 | −1 | ttcttaagtttgtttaactt | tgg | exon 2 |
| 30 | 29576 | 1 | aaagttaaacaaacttaaga | agg | exon 2 |
| 31 | 29742 | 1 | ctaagtgataacagaatctc | agg | exon 3 |
| 32 | 29743 | 1 | taagtgataacagaatctca | ggg | exon 3 |
| 33 | 29744 | 1 | aagtgataacagaatctcag | ggg | exon 3 |
| 34 | 29745 | 1 | agtgataacagaatctcagg | ggg | exon 3 |
| 35 | 29750 | 1 | taacagaatctcagggggcc | tgg | exon 3 |
| 36 | 29757 | −1 | acttttctgccaatacttcc | agg | exon 3 |
| 37 | 29759 | 1 | ctcagggggcctggaagtat | tgg | exon 3 |
| 38 | 29782 | −1 | aaatttagatgtgtgaggtt | cgg | exon 3 |
| 39 | 29787 | −1 | cacttaaatttagatgtgtg | agg | exon 3 |
| 40 | 29799 | 1 | ctcacacatctaaatttaag | tgg | exon 3 |
| 41 | 29837 | 1 | cctcagcacagtagagccac | tgg | exon 3 |

TABLE 7
Illustrative ANP32B gRNA sequences

| SEQ ID NO. | Position | Strand | Sequence | PAM | Location |
|---|---|---|---|---|---|
| 42 | 10858 | 1 | gataattgcaaatcaagtga | tgg | exon 2 |
| 43 | 10859 | 1 | ataattgcaaatcaagtgat | ggg | exon 2 |
| 44 | 10869 | 1 | atcaagtgatgggaaaattg | agg | exon 2 |
| 45 | 10870 | 1 | tcaagtgatgggaaaattga | ggg | exon 2 |
| 46 | 10912 | −1 | accctacatttattaaactg | agg | exon 2 |
| 47 | 10921 | 1 | ttcctcagtttaataaatgt | agg | exon 2 |
| 48 | 10922 | 1 | tcctcagtttaataaatgta | ggg | exon 2 |
| 49 | 10954 | −1 | ttttcaatttaggtagtttg | ggg | exon 2 |
| 50 | 10955 | −1 | tttttcaatttaggtagttt | ggg | exon 2 |
| 51 | 10956 | −1 | ctttttcaatttaggtagtt | tgg | exon 2 |
| 52 | 10964 | −1 | gcacttacctttttcaattt | agg | exon 2 |
| 53 | 10968 | 1 | caaactacctaaattgaaaa | agg | exon 2 |
| 54 | 14295 | 1 | ctcagtgacaatagaatcta | tgg | exon 3 |
| 55 | 14298 | 1 | agtgacaatagaatctatgg | agg | exon 3 |
| 56 | 14303 | 1 | caatagaatctatggaggtc | tgg | exon 3 |
| 57 | 14335 | −1 | aagtttagatgtgtgagatt | tgg | exon 3 |
| 58 | 14387 | −1 | actacttaccaaaggttcca | ggg | exon 3 |
| 59 | 14388 | −1 | aactacttaccaaaggttcc | agg | exon 3 |
| 60 | 14395 | −1 | aattctcaactacttaccaa | agg | intron 3 |

[0243] The gRNA can comprise a nucleotide sequence comprising any one of SEQ ID NOs. 15-7,576.

[0244] For targeting an ANP32A gene, the gRNA can comprise a nucleotide sequence comprising any one of SEQ ID NOs. 15-41 and 61-5,109. For example, the gRNA can comprise any one of SEQ ID NOs. 15-41. Alternatively, the targeting molecules can comprise a pair of guides selected from any two of SEQ ID NOs: 15-41 and 61-5,109. The pair of guides can be selected from any two of SEQ ID NOs: 15-41. The pair of guides can be SEQ ID NOs: 26 and 19, SEQ ID NOs: 33 and 36, SEQ ID NOs: 33 and 40, SEQ ID NOs: 15 and 22, SEQ ID NOs: 15 and 23, SEQ ID NOs: 16 and 24, or SEQ ID NOs: 17 and 24.

[0245] For targeting an ANP32B gene, the gRNA can comprise a nucleotide sequence comprising any one of SEQ ID NOs. 42-60 and 5,110-7,576. For example, the gRNA can comprise any one of SEQ ID NOs. 42-60. Alternatively, the targeting molecules can comprise a pair of guides selected from any two of SEQ ID NOs: 42-60 and 5,110-7,576. The pair of guides can be selected from any two of SEQ ID NOs: 42-60. The pair of guides can be SEQ ID NOs: 44 and 46, SEQ ID NOs: 55 and 58, or SEQ ID NOs: 55 and 59.

[0246] The gRNA can have a length of 100 nucleotides or fewer, 90 nucleotides or fewer, 80 nucleotides or fewer, 70 nucleotides or fewer, 60 nucleotides or fewer, 50 nucleotides or fewer, 40 nucleotides or fewer, 30 nucleotides or fewer, or 20 nucleotides or fewer. For example, the gRNA can have a length of 20 nucleotides.

[0247] An exemplary edited sequence for ANP32A is gggaactggcaggcctcccgggcatagcccctcctgcgctctatttaccncttaagffigtttaactttggtaagtttgcgactgaggtga ggcctacacgagctattcacctggaaagacaaggccggcgtgaatggggtgaggaatggggcccaagaccggggaggggacag gaggcagaccagaaggcacctcta (SEQ ID NO: 7577). This sequence provides end-to-end cut site repair (NHEJ) for SEQ ID NOs: 26 and 19; the exogenous stop codon is created through this NHEJ repair. 100 bp on either end of the cut site are provided.

[0248] An exemplary edited sequence for ANP32B is ggttacttctaacaccttaatgatatgtgtttcttffigtgffigtgtgccgtgtgcatitticcctttaacagcttgagctcagtgacaatagaat ctaaccffiggtaagtagttgagaatttggaaaacaggactttctggicattncattncatatttctnatggtgagggaaataattgaaagtt ataatgg (SEQ ID NO: 7578). This sequence provides end-to-end cut site repair (NHEJ) for SEQ ID NOs: 55 and 59; the exogenous stop codon is created through this NHEJ repair. 100 bp on either end of the cut site are provided.

### Affinity Tags

[0249] An “affinity tag” can be either a peptide affinity tag or a nucleic acid affinity tag. The term “affinity tag” generally refers to a protein or nucleic acid sequence that can be bound to a molecule (e.g., bound by a small molecule, protein, or covalent bond). An affinity tag can be a non-native sequence. A peptide affinity tag can comprise a peptide. A peptide affinity tag can be one that is able to be part of a split system (e.g., two inactive peptide fragments can combine together in trans to form an active affinity tag). A nucleic acid affinity tag can comprise a nucleic acid. A nucleic acid affinity tag can be a sequence that can selectively bind to a known nucleic acid sequence (e.g. through hybridization). A nucleic acid affinity tag can be a sequence that can selectively bind to a protein. An affinity tag can be fused to a native protein. An affinity tag can be fused to a nucleotide sequence.

[0250] Sometimes, one, two, or a plurality of affinity tags can be fused to a native protein or nucleotide sequence. An affinity tag can be introduced into a nucleic acid-targeting nucleic acid using methods of in vitro or in vivo transcription. Nucleic acid affinity tags can include, for example, a chemical tag, an RNA-binding protein binding sequence, a DNA-binding protein binding sequence, a sequence hybridizable to an affinity-tagged polynucleotide, a synthetic RNA aptamer, or a synthetic DNA aptamer. Examples of chemical nucleic acid affinity tags can include, but are not limited to, ribo-nucleotriphosphates containing biotin, fluorescent dyes, and digoxeginin. Examples of protein-binding nucleic acid affinity tags can include, but are not limited to, the MS2 binding sequence, the U1A binding sequence, stem-loop binding protein sequences, the boxB sequence, the eIF4A sequence, or any sequence recognized by an RNA binding protein. Examples of nucleic acid affinity-tagged oligonucleotides can include, but are not limited to, biotinylated oligonucleotides, 2,4-dinitrophenyl oligonucleotides, fluorescein oligonucleotides, and primary amine-conjugated oligonucleotides.

[0251] A nucleic acid affinity tag can be an RNA aptamer. Aptamers can include, aptamers that bind to theophylline, streptavidin, dextran B512, adenosine, guanosine, guanine/xanthine, 7-methyl-GTP, amino acid aptamers such as aptamers that bind to arginine, citrulline, valine, tryptophan, cyanocobalamine, N-methylmesoporphyrin IX, flavin, NAD, and antibiotic aptamers such as aptamers that bind to tobramycin, neomycin, lividomycin, kanamycin, streptomycin, viomycin, and chloramphenicol.

[0252] A nucleic acid affinity tag can comprise an RNA sequence that can be bound by a site-directed polypeptide. The site-directed polypeptide can be conditionally enzymatically inactive. The RNA sequence can comprise a sequence that can be bound by a member of Type I, Type II, and/or Type III CRISPR systems. The RNA sequence can be bound by a RAMP family member protein. The RNA sequence can be bound by a Cas9 family member protein, a Cas6 family member protein (e.g., Csy4, Cas6). The RNA sequence can be bound by a Cas5 family member protein (e.g., Cas5). For example, Csy4 can bind to a specific RNA hairpin sequence with high affinity (Kd ˜50 pM) and can cleave RNA at a site 3′ to the hairpin.

[0253] A nucleic acid affinity tag can comprise a DNA sequence that can be bound by a site-directed polypeptide. The site-directed polypeptide can be conditionally enzymatically inactive. The DNA sequence can comprise a sequence that can be bound by a member of the Type I, Type II, and/or Type III CRISPR systems. The DNA sequence can be bound by an Argonaut protein. The DNA sequence can be bound by a protein containing a zinc finger domain, a TALE domain, or any other DNA-binding domain.

[0254] A nucleic acid affinity tag can comprise a ribozyme sequence. Suitable ribozymes can include peptidyl transferase 23 SrRNA, RnaseP, Group I introns, Group II introns, GIR1 branching ribozyme, Leadzyme, hairpin ribozymes, hammerhead ribozymes, HDV ribozymes, CPEB3 ribozymes, VS ribozymes, glmS ribozyme, CoTC ribozyme, and synthetic ribozymes.

[0255] Peptide affinity tags can comprise tags that can be used for tracking or purification (e.g., a fluorescent protein such as green fluorescent protein (GFP), YFP, RFP, CFP, mCherry, tdTomato; a His tag, (e.g., a 6×His tag); a hemagglutinin (HA) tag; a FLAG tag; a Myc tag; a GST tag; a MBP tag; a chitin binding protein tag; a calmodulin tag; a V5 tag; a streptavidin binding tag; and the like).

[0256] Both nucleic acid and peptide affinity tags can comprise small molecule tags such as biotin, or digitoxin, and fluorescent label tags, such as for example, fluoroscein, rhodamin, Alexa fluor dyes, Cyanine3 dye, Cyanine5 dye.

[0257] Nucleic acid affinity tags can be located 5′ to a nucleic acid (e.g., a nucleic acid-targeting nucleic acid). Nucleic acid affinity tags can be located 3′ to a nucleic acid. Nucleic acid affinity tags can be located 5′ and 3′ to a nucleic acid. Nucleic acid affinity tags can be located within a nucleic acid. Peptide affinity tags can be located N-terminal to a polypeptide sequence. Peptide affinity tags can be located C-terminal to a polypeptide sequence. Peptide affinity tags can be located N-terminal and C-terminal to a polypeptide sequence. A plurality of affinity tags can be fused to a nucleic acid and/or a polypeptide sequence.

### Capture Agents

[0258] As used herein, “capture agent” can generally refer to an agent that can purify a polypeptide and/or a nucleic acid. A capture agent can be a biologically active molecule or material (e.g. any biological substance found in nature or synthetic, and includes but is not limited to cells, viruses, subcellular particles, proteins, including more specifically antibodies, immunoglobulins, antigens, lipoproteins, glycoproteins, peptides, polypeptides, protein complexes, (strept)avidin-biotin complexes, ligands, receptors, or small molecules, aptamers, nucleic acids, DNA, RNA, peptidic nucleic acids, oligosaccharides, polysaccharides, lipopolysaccharides, cellular metabolites, haptens, pharmacologically active substances, alkaloids, steroids, vitamins, amino acids, and sugars). In some embodiments, the capture agent can comprise an affinity tag. In some embodiments, a capture agent can preferentially bind to a target polypeptide or nucleic acid of interest. Capture agents can be free floating in a mixture. Capture agents can be bound to a particle (e.g. a bead, a microbead, a nanoparticle). Capture agents can be bound to a solid or semisolid surface. In some instances, capture agents are irreversibly bound to a target. In other instances, capture agents are reversibly bound to a target (e.g., if a target can be eluted, or by use of a chemical such as imidazole).

### Targeted Integration of a Nucleic Acid at an ANP32 Locus

[0259] Site-specific integration of an exogenous nucleic acid at an ANP32 locus may be accomplished by any technique known to those of skill in the art. For example, integration of an exogenous nucleic acid at an ANP32 locus can comprise contacting a cell (e.g., an isolated cell or a cell in a tissue or organism) with a nucleic acid molecule comprising the exogenous nucleic acid. Such a nucleic acid molecule can comprise nucleotide sequences flanking the exogenous nucleic acid that facilitate homologous recombination between the nucleic acid molecule and at least one ANP32 locus. The nucleotide sequences flanking the exogenous nucleic acid that facilitate homologous recombination can be complementary to endogenous nucleotides of the ANP32 locus. Alternatively, the nucleotide sequences flanking the exogenous nucleic acid that facilitate homologous recombination can be complementary to previously integrated exogenous nucleotides. A plurality of exogenous nucleic acids can be integrated at one ANP32 locus, such as in gene stacking.

[0260] Integration of a nucleic acid at an ANP32 locus can be facilitated (e.g., catalyzed) by endogenous cellular machinery of a host cell, such as, for example and without limitation, endogenous DNA and endogenous recombinase enzymes. Alternatively, integration of a nucleic acid at an ANP32 locus can be facilitated by one or more factors (e.g., polypeptides) that are provided to a host cell. For example, nuclease(s), recombinase(s), and/or ligase polypeptides may be provided (either independently or as part of a chimeric polypeptide) by contacting the polypeptides with the host cell, or by expressing the polypeptides within the host cell. Accordingly, a nucleic acid comprising a nucleotide sequence encoding at least one nuclease, recombinase, and/or ligase polypeptide may be introduced into the host cell, either concurrently or sequentially with a nucleic acid to be integrated site-specifically at an ANP32 locus, wherein the at least one nuclease, recombinase, and/or ligase polypeptide is expressed from the nucleotide sequence in the host cell.

### DNA-Binding Polypeptides

[0261] Site-specific integration can be accomplished by using factors that are capable of recognizing and binding to particular nucleotide sequences, for example, in the genome of a host organism. For instance, many proteins comprise polypeptide domains that are capable of recognizing and binding to DNA in a site-specific manner. A DNA sequence that is recognized by a DNA-binding polypeptide may be referred to as a “target” sequence. Polypeptide domains that are capable of recognizing and binding to DNA in a site-specific manner generally fold correctly and function independently to bind DNA in a site-specific manner, even when expressed in a polypeptide other than the protein from which the domain was originally isolated. Similarly, target sequences for recognition and binding by DNA-binding polypeptides are generally able to be recognized and bound by such polypeptides, even when present in large DNA structures (e.g., a chromosome), particularly when the site where the target sequence is located is one known to be accessible to soluble cellular proteins (e.g., a gene).

[0262] While DNA-binding polypeptides identified from proteins that exist in nature typically bind to a discrete nucleotide sequence or motif (e.g., a consensus recognition sequence), methods exist and are known in the art for modifying many such DNA-binding polypeptides to recognize a different nucleotide sequence or motif. DNA-binding polypeptides include, for example and without limitation: zinc finger DNA-binding domains; leucine zippers; UPA DNA-binding domains; GAL4; TAL; LexA; Tet repressors; Lad; and steroid hormone receptors.

[0263] For example, the DNA-binding polypeptide can be a zinc finger. Individual zinc finger motifs can be designed to target and bind specifically to any of a large range of DNA sites. Canonical Cys2His2 (as well as non-canonical Cys3His) zinc finger polypeptides bind DNA by inserting an α-helix into the major groove of the target DNA double helix. Recognition of DNA by a zinc finger is modular; each finger contacts primarily three consecutive base pairs in the target, and a few key residues in the polypeptide mediate recognition. By including multiple zinc finger DNA-binding domains in a targeting endonuclease, the DNA-binding specificity of the targeting endonuclease may be further increased (and hence the specificity of any gene regulatory effects conferred thereby may also be increased). See, e.g., Umov et al. (2005) Nature 435:646-51. Thus, one or more zinc finger DNA-binding polypeptides may be engineered and utilized such that a targeting endonuclease introduced into a host cell interacts with a DNA sequence that is unique within the genome of the host cell.

[0264] Preferably, the zinc finger protein is non-naturally occurring in that it is engineered to bind to a target site of choice. See, for example, Beerli et al. (2002) Nature Biotechnol. 20:135-141; Pabo et al. (2001) Ann. Rev. Biochem. 70:313-340; Isalan et al. (2001) Nature Biotechnol. 19:656-660; Segal et al. (2001) Curr. Opin. Biotechnol. 12:632-637; Choo et al. (2000) Curr. Opin. Struct. Biol. 10:411-416; U.S. Pat. Nos. 6,453,242; 6,534,261; 6,599,692; 6,503,717; 6,689,558; 7,030,215; 6,794,136; 7,067,317; 7,262,054; 7,070,934; 7,361,635; 7,253,273; and U.S. Patent Publication Nos. 2005/0064474; 2007/0218528; 2005/0267061.

[0265] An engineered zinc finger binding domain can have a novel binding specificity, compared to a naturally-occurring zinc finger protein. Engineering methods include, but are not limited to, rational design and various types of selection. Rational design includes, for example, using databases comprising triplet (or quadruplet) nucleotide sequences and individual zinc finger amino acid sequences, in which each triplet or quadruplet nucleotide sequence is associated with one or more amino acid sequences of zinc fingers which bind the particular triplet or quadruplet sequence. See, for example, U.S. Pat. Nos. 6,453,242 and 6,534,261.

[0266] Illustrative selection methods, including phage display and two-hybrid systems, are disclosed in U.S. Pat. Nos. 5,789,538; 5,925,523; 6,007,988; 6,013,453; 6,410,248; 6,140,466; 6,200,759; and 6,242,568; as well as WO 98/37186; WO 98/53057; WO 00/27878; WO 01/88197 and GB 2,338,237. In addition, enhancement of binding specificity for zinc finger binding domains has been described, for example, in WO 02/077227.

[0267] In addition, as disclosed in these and other references, zinc finger domains and/or multi-fingered zinc finger proteins may be linked together using any suitable linker sequences, including for example, linkers of 5 or more amino acids in length. See, also, U.S. Pat. Nos. 6,479,626; 6,903,185; and 7,153,949 for illustrative linker sequences 6 or more amino acids in length. The proteins described herein may include any combination of suitable linkers between the individual zinc fingers of the protein.

[0268] Selection of target sites: ZFPs and methods for design and construction of fusion proteins (and polynucleotides encoding same) are known to those of skill in the art and described in detail in U.S. Pat. Nos. 6,140,0815; 789,538; 6,453,242; 6,534,261; 5,925,523; 6,007,988; 6,013,453; 6,200,759; WO 95/19431; WO 96/06166; WO 98/53057; WO 98/54311; WO 00/27878; WO 01/60970 WO 01/88197; WO 02/099084; WO 98/53058; WO 98/53059; WO 98/53060; WO 02/016536 and WO 03/016496.

[0269] Where an animal or cell as described herein has been genetically edited using a zinc-finger nuclease, the animal or cell can be created using a process comprising introducing into an embryo or cell at least one RNA molecule encoding a targeted zinc finger nuclease and, optionally, at least one accessory polynucleotide. The method further comprises incubating the embryo or cell to allow expression of the zinc finger nuclease, wherein a double-stranded break introduced into the targeted chromosomal sequence by the zinc finger nuclease is repaired by an error-prone non-homologous end-joining DNA repair process or a homology-directed DNA repair process. The method of editing chromosomal sequences encoding a protein associated with germline development using targeted zinc finger nuclease technology is rapid, precise, and highly efficient.

[0270] Alternatively, the DNA-binding polypeptide is a DNA-binding domain from GAL4. GAL4 is a modular transactivator in Saccharomyces cerevisiae, but it also operates as a transactivator in many other organisms. See, e.g., Sadowski et al. (1988) Nature 335:563-4. In this regulatory system, the expression of genes encoding enzymes of the galactose metabolic pathway in S. cerevisiae is stringently regulated by the available carbon source. Johnston (1987) Microbiol. Rev. 51:458-76. Transcriptional control of these metabolic enzymes is mediated by the interaction between the positive regulatory protein, GAL4, and a 17 bp symmetrical DNA sequence to which GAL4 specifically binds (the upstream activation sequence (UAS)).

[0271] Native GAL4 consists of 881 amino acid residues, with a molecular weight of 99 kDa. GAL4 comprises functionally autonomous domains, the combined activities of which account for activity of GAL4 in vivo. Ma and Ptashne (1987) Cell 48:847-53); Brent and Ptashne (1985) Cell 43(3 Pt 2):729-36. The N-terminal 65 amino acids of GAL4 comprise the GAL4 DNA-binding domain. Keegan et al. (1986) Science 231:699-704; Johnston (1987) Nature 328:353-5. Sequence-specific binding requires the presence of a divalent cation coordinated by six Cys residues present in the DNA binding domain. The coordinated cation-containing domain interacts with and recognizes a conserved CCG triplet at each end of the 17 bp UAS via direct contacts with the major groove of the DNA helix. Marmorstein et al. (1992) Nature 356:408-14. The DNA-binding function of the protein positions C-terminal transcriptional activating domains in the vicinity of the promoter, such that the activating domains can direct transcription.

[0272] Additional DNA-binding polypeptides that can be used include, for example and without limitation, a binding sequence from a AVRBS3-inducible gene; a consensus binding sequence from a AVRBS3-inducible gene or synthetic binding sequence engineered therefrom (e.g., UPA DNA-binding domain); TAL; LexA (see, e.g., Brent & Ptashne (1985), supra); LacR (see, e.g., Labow et al. (1990) Mol. Cell. Biol. 10:3343-56; Baim et al. (1991) Proc. Natl. Acad. Sci. USA 88(12):5072-6); a steroid hormone receptor (Elliston et al. (1990) J. Biol. Chem. 265:11517-121); the Tet repressor (U.S. Pat. No. 6,271,341) and a Tet repressor variant that binds to a tet operator sequence in the presence, but not the absence, of tetracycline (Tc); the DNA-binding domain of NF-kappaB; and components of the regulatory system described in Wang et al. (1994) Proc. Natl. Acad. Sci. USA 91(17):8180-4, which utilizes a fusion of GAL4, a hormone receptor, and VP16.

[0273] The DNA-binding domain of one or more of the nucleases used in the methods and compositions described herein can comprise a naturally occurring or engineered (non-naturally occurring) TAL effector DNA binding domain. See, e.g., U.S. Patent Publication No. 2011/0301073.

[0274] Alternatively, the nuclease can comprise a CRISPR system. For example, the nuclease can comprise a CRISPR/Cas system.

[0275] The CRISPR-associated system evolved in bacteria and archaea as an adaptive immune system to defend against viral attack. Upon exposure to a virus, short segments of viral DNA are integrated into the CRISPR locus. RNA is transcribed from a portion of the CRISPR locus that includes the viral sequence. That RNA, which contains sequence complementary to the viral genome, mediates targeting of a Cas protein (e.g., a Cas9 protein) to the sequence in the viral genome. The Cas protein cleaves and thereby silences the viral target. Recently, the CRISPR/Cas system has been adapted for genome editing in eukaryotic cells. The introduction of site-specific double strand breaks (DSBs) enables target sequence alteration through one of two endogenous DNA repair mechanisms—either non-homologous end-joining (NHEJ) or homology-directed repair (HDR). The CRISPR/Cas system has also been used for gene regulation including transcription repression and activation without altering the target sequence. Targeted gene regulation based on the CRISPR/Cas system can, for example, use an enzymatically inactive Cas9 (also known as a catalytically dead Cas9).

[0276] CRISPR/Cas systems include a CRISPR (clustered regularly interspaced short palindromic repeats) locus, which encodes RNA components of the system, and a Cas (CRISPR-associated) locus, which encodes proteins (Jansen et al., 2002. Mol. Microbiol. 43: 1565-1575; Makarova et al., 2002. Nucleic Acids Res. 30: 482-496; Makarova et al., 2006. Biol. Direct 1: 7; Haft et al., 2005. PLoS Comput. Biol. 1: e60). CRISPR loci in microbial hosts contain a combination of Cas genes as well as non-coding RNA elements capable of programming the specificity of the CRISPR-mediated nucleic acid cleavage.

[0277] The Type II CRISPR is one of the most well characterized systems and carries out targeted DNA double-strand break in nature in four sequential steps. First, two non-coding RNAs, the pre-crRNA array and tracrRNA, are transcribed from the CRISPR locus. Second, tracrRNA hybridizes to the repeat regions of the pre-crRNA and mediates the processing of pre-crRNA into mature crRNAs containing individual spacer sequences. Third, the mature crRNA:tracrRNA complex directs Cas9 to the target DNA via Watson-Crick base-pairing between the spacer on the crRNA and the protospacer on the target DNA next to the protospacer adjacent motif (PAM), an additional requirement for target recognition. Finally, Cas9 mediates cleavage of target DNA to create a double-stranded break within the protospacer.

[0278] For use of the CRISPR/Cas system to create targeted insertions and deletions, the two non-coding RNAs (crRNA and the TracrRNA) can be replaced by a single RNA referred to as a guide RNA (gRNA). Activity of the CRISPR/Cas system comprises three steps: (i) insertion of exogenous DNA sequences into the CRISPR array to prevent future attacks, in a process called “adaptation,” (ii) expression of the relevant proteins, as well as expression and processing of the array, followed by (iii) RNA-mediated interference with the foreign nucleic acid. In the bacterial cell, several Cas proteins are involved with the natural function of the CRISPR/Cas system and serve roles in functions such as insertion of the foreign DNA etc.

[0279] The Cas protein can be a “functional derivative” of a naturally occurring Cas protein. A “functional derivative” of a native sequence polypeptide is a compound having a qualitative biological property in common with a native sequence polypeptide. “Functional derivatives” include, but are not limited to, fragments of a native sequence and derivatives of a native sequence polypeptide and its fragments, provided that they have a biological activity in common with a corresponding native sequence polypeptide. A biological activity contemplated herein is the ability of the functional derivative to hydrolyze a DNA substrate into fragments. The term “derivative” encompasses both amino acid sequence variants of polypeptide, covalent modifications, and fusions thereof. Suitable derivatives of a Cas polypeptide or a fragment thereof include but are not limited to mutants, fusions, covalent modifications of Cas protein or a fragment thereof. Cas protein, which includes Cas protein or a fragment thereof, as well as derivatives of Cas protein or a fragment thereof, may be obtainable from a cell or synthesized chemically or by a combination of these two procedures. The cell may be a cell that naturally produces Cas protein, or a cell that naturally produces Cas protein and is genetically engineered to produce the endogenous Cas protein at a higher expression level or to produce a Cas protein from an exogenously introduced nucleic acid, which nucleic acid encodes a Cas that is same or different from the endogenous Cas. In some case, the cell does not naturally produce Cas protein and is genetically engineered to produce a Cas protein.

[0280] Where an animal or cell as described herein is genetically edited using a CRISPR system, a CRISPR/Cas9 system can be used to generate the animal or cell. To use Cas9 to edit genomic sequences, the protein can be delivered directly to a cell. Alternatively, an mRNA that encodes Cas9 can be delivered to a cell, or a gene that provides for expression of an mRNA that encodes Cas9 can be delivered to a cell. In addition, either target specific crRNA and a tracrRNA can be delivered directly to a cell or target specific gRNA(s) can be to a cell (these RNAs can alternatively be produced by a gene constructed to express these RNAs). Selection of target sites and designed of crRNA/gRNA are well known in the art. A discussion of construction and cloning of gRNAs can be found at http://www(dot)genome-engineering(dot)org/crispr/wp-content/uploads/2014/05/CRISPR-Reagent-Description-Rev20140509.pdf.

[0281] A guide RNA of a CRISPR/Cas system or DNA-binding polypeptide can specifically recognize and bind to a target nucleotide sequence comprised within a genomic nucleic acid of a host organism. Any number of discrete instances of the target nucleotide sequence may be found in the host genome in some examples. The target nucleotide sequence may be rare within the genome of the organism (e.g., fewer than about 10, about 9, about 8, about 7, about 6, about 5, about 4, about 3, about 2, or about 1 copy(ies) of the target sequence may exist in the genome). For example, the target nucleotide sequence may be located at a unique site within the genome of the organism. Target nucleotide sequences may be, for example and without limitation, randomly dispersed throughout the genome with respect to one another; located in different linkage groups in the genome; located in the same linkage group; located on different chromosomes; located on the same chromosome; located in the genome at sites that are expressed under similar conditions in the organism (e.g., under the control of the same, or substantially functionally identical, regulatory factors); and located closely to one another in the genome (e.g., target sequences may be comprised within nucleic acids integrated as concatemers at genomic loci).

### Targeting Endonucleases

[0282] A DNA-binding polypeptide that specifically recognizes and binds to a target nucleotide sequence can be comprised within a chimeric polypeptide, so as to confer specific binding to the target sequence upon the chimeric polypeptide. In examples, such a chimeric polypeptide may comprise, for example and without limitation, nuclease, recombinase, and/or ligase polypeptides, as these polypeptides are described above. Chimeric polypeptides comprising a DNA-binding polypeptide and a nuclease, recombinase, and/or ligase polypeptide may also comprise other functional polypeptide motifs and/or domains, such as for example and without limitation: a spacer sequence positioned between the functional polypeptides in the chimeric protein; a leader peptide; a peptide that targets the fusion protein to an organelle (e.g., the nucleus); polypeptides that are cleaved by a cellular enzyme; peptide tags (e.g., Myc, His, etc.); and other amino acid sequences that do not interfere with the function of the chimeric polypeptide.

[0283] Functional polypeptides (e.g., DNA-binding polypeptides and nuclease polypeptides) in a chimeric polypeptide may be operatively linked. Functional polypeptides of a chimeric polypeptide can be operatively linked by their expression from a single polynucleotide encoding at least the functional polypeptides ligated to each other in-frame, so as to create a chimeric gene encoding a chimeric protein. Alternatively, the functional polypeptides of a chimeric polypeptide can be operatively linked by other means, such as by cross-linkage of independently expressed polypeptides.

[0284] A DNA-binding polypeptide, or guide RNA that specifically recognizes and binds to a target nucleotide sequence can be comprised within a natural isolated protein (or variant thereof), wherein the natural isolated protein or variant thereof also comprises a nuclease polypeptide (and may also comprise a recombinase and/or ligase polypeptide). Examples of such isolated proteins include TALENs, recombinases (e.g., Cre, Hin, Tre, and FLP recombinase), RNA-guided CRISPR/Cas9, and meganucleases.

[0285] As used herein, the term “targeting endonuclease” refers to natural or engineered isolated proteins and variants thereof that comprise a DNA-binding polypeptide or guide RNA and a nuclease polypeptide, as well as to chimeric polypeptides comprising a DNA-binding polypeptide or guide RNA and a nuclease. Any targeting endonuclease comprising a DNA-binding polypeptide or guide RNA that specifically recognizes and binds to a target nucleotide sequence comprised within an ANP32 locus (e.g., either because the target sequence is comprised within the native sequence at the locus, or because the target sequence has been introduced into the locus, for example, by recombination) can be used.

[0286] Some examples of suitable chimeric polypeptides include, without limitation, combinations of the following polypeptides: zinc finger DNA-binding polypeptides; a FokI nuclease polypeptide; TALE domains; leucine zippers; transcription factor DNA-binding motifs; and DNA recognition and/or cleavage domains isolated from, for example and without limitation, a TALEN, a recombinase (e.g., Cre, Hin, RecA, Tre, and FLP recombinases), RNA-guided CRISPR/Cas9, a meganuclease; and others known to those in the art. Particular examples include a chimeric protein comprising a site-specific DNA binding polypeptide and a nuclease polypeptide. Chimeric polypeptides may be engineered by methods known to those of skill in the art to alter the recognition sequence of a DNA-binding polypeptide comprised within the chimeric polypeptide, so as to target the chimeric polypeptide to a particular nucleotide sequence of interest.

[0287] The chimeric polypeptide can comprise a DNA-binding domain (e.g., zinc finger, TAL-effector domain, etc.) and a nuclease (cleavage) domain. The cleavage domain may be heterologous to the DNA-binding domain, for example a zinc finger DNA-binding domain and a cleavage domain from a nuclease or a TALEN DNA-binding domain and a cleavage domain, or meganuclease DNA-binding domain and cleavage domain from a different nuclease. Heterologous cleavage domains can be obtained from any endonuclease or exonuclease. Illustrative endonucleases from which a cleavage domain can be derived include, but are not limited to, restriction endonucleases and homing endonucleases. See, for example, 2002-2003 Catalogue, New England Biolabs, Beverly, Mass.; and Belfort et al. (1997) Nucleic Acids Res. 25:3379-3388. Additional enzymes which cleave DNA are known (e.g., 51 Nuclease; mung bean nuclease; pancreatic DNAse I; micrococcal nuclease; yeast HO endonuclease; see also Linn et al. (eds.) Nucleases, Cold Spring Harbor Laboratory Press, 1993). One or more of these enzymes (or functional fragments thereof) can be used as a source of cleavage domains and cleavage half-domains.

[0288] Similarly, a cleavage half-domain can be derived from any nuclease or portion thereof, as set forth above, that requires dimerization for cleavage activity. In general, two fusion proteins are required for cleavage if the fusion proteins comprise cleavage half-domains. Alternatively, a single protein comprising two cleavage half-domains can be used. The two cleavage half-domains can be derived from the same endonuclease (or functional fragments thereof), or each cleavage half-domain can be derived from a different endonuclease (or functional fragments thereof). In addition, the target sites for the two fusion proteins are preferably disposed, with respect to each other, such that binding of the two fusion proteins to their respective target sites places the cleavage half-domains in a spatial orientation to each other that allows the cleavage half-domains to form a functional cleavage domain, e.g., by dimerizing. Thus, the near edges of the target sites can be separated by 5-8 nucleotides or by 15-18 nucleotides. However, any integral number of nucleotides, or nucleotide pairs, can intervene between two target sites (e.g., from 2 to 50 nucleotide pairs or more). In general, the site of cleavage lies between the target sites.

[0289] Restriction endonucleases (restriction enzymes) are present in many species and are capable of sequence-specific binding to DNA (at a recognition site), and cleaving DNA at or near the site of binding, for example, such that one or more exogenous sequences (donors/transgenes) are integrated at or near the binding (target) sites. Certain restriction enzymes (e.g., Type IIS) cleave DNA at sites removed from the recognition site and have separable binding and cleavage domains. For example, the Type IIS enzyme Fok I catalyzes double-stranded cleavage of DNA, at 9 nucleotides from its recognition site on one strand and 13 nucleotides from its recognition site on the other. See, for example, U.S. Pat. Nos. 5,356,802; 5,436,150 and 5,487,994; as well as Li et al. (1992) Proc. Natl. Acad. Sci. USA 89:4275-4279; Li et al. (1993) Proc. Natl. Acad. Sci. USA 90:2764-2768; Kim et al. (1994a) Proc. Natl. Acad. Sci. USA 91:883-887; Kim et al. (1994b) J. Biol. Chem. 269:31,978-31,982. Thus, fusion proteins can comprise the cleavage domain (or cleavage half-domain) from at least one Type IIS restriction enzyme and one or more zinc finger binding domains, which may or may not be engineered.

[0290] An illustrative Type IIS restriction enzyme, whose cleavage domain is separable from the binding domain, is Fok I. This particular enzyme is active as a dimer. Bitinaite et al. (1998) Proc. Natl. Acad. Sci. USA 95: 10,570-10,575. Accordingly, for the purposes of the present disclosure, the portion of the Fok I enzyme used in the disclosed fusion proteins is considered a cleavage half-domain. Thus, for targeted double-stranded cleavage and/or targeted replacement of cellular sequences using zinc finger-Fok I fusions, two fusion proteins, each comprising a FokI cleavage half-domain, can be used to reconstitute a catalytically active cleavage domain. Alternatively, a single polypeptide molecule containing a DNA binding domain and two Fok I cleavage half-domains can also be used.

[0291] A cleavage domain or cleavage half-domain can be any portion of a protein that retains cleavage activity, or that retains the ability to multimerize (e.g., dimerize) to form a functional cleavage domain.

[0292] Illustrative Type IIS restriction enzymes are described in U.S. Patent Publication No. 2007/0134796. Additional restriction enzymes also contain separable binding and cleavage domains, and these are contemplated by the present disclosure. See, for example, Roberts et al. (2003) Nucleic Acids Res. 31:418-420.

[0293] The cleavage domain can comprise one or more engineered cleavage half-domain (also referred to as dimerization domain variants) that minimize or prevent homodimerization, as described, for example, in U.S. Patent Publication Nos. 2005/0064474; 2006/0188987 and 2008/0131962.

[0294] Alternatively, nucleases may be assembled in vivo at the nucleic acid target site using so-called “split-enzyme” technology (see e.g. U.S. Patent Publication No. 20090068164). Components of such split enzymes may be expressed either on separate expression constructs, or can be linked in one open reading frame where the individual components are separated, for example, by a self-cleaving 2A peptide or IRES sequence. Components may be individual zinc finger binding domains or domains of a meganuclease nucleic acid binding domain.

### Zinc Finger Nucleases

[0295] A chimeric polypeptide can comprise a custom-designed zinc finger nuclease (ZFN) that may be designed to deliver a targeted site-specific double-strand DNA break into which an exogenous nucleic acid, or donor DNA, may be integrated (see US Patent publication 2010/0257638). ZFNs are chimeric polypeptides containing a non-specific cleavage domain from a restriction endonuclease (for example, FokI) and a zinc finger DNA-binding domain polypeptide. See, e.g., Huang et al. (1996) J. Protein Chem. 15:481-9; Kim et al. (1997a) Proc. Natl. Acad. Sci. USA 94:3616-20; Kim et al. (1996) Proc. Natl. Acad. Sci. USA 93:1156-60; Kim et al. (1994) Proc. Natl. Acad. Sci. USA 91:883-7; Kim et al. (1997b) Proc. Natl. Acad. Sci. USA 94:12875-9; Kim et al. (1997c) Gene 203:43-9; Kim et al. (1998) Biol. Chem. 379:489-95; Nahon and Raveh (1998) Nucleic Acids Res. 26:1233-9; Smith et al. (1999) Nucleic Acids Res. 27:674-81. The ZFNs can comprise non-canonical zinc finger DNA binding domains (see US Patent publication 2008/0182332). The FokI restriction endonuclease must dimerize via the nuclease domain in order to cleave DNA and introduce a double-strand break. Consequently, ZFNs containing a nuclease domain from such an endonuclease also require dimerization of the nuclease domain in order to cleave target DNA. Mani et al. (2005) Biochem. Biophys. Res. Commun. 334:1191-7; Smith et al. (2000) Nucleic Acids Res. 28:3361-9. Dimerization of the ZFN can be facilitated by two adjacent, oppositely oriented DNA-binding sites. Id.

[0296] A method for the site-specific integration of an exogenous nucleic acid into at least one ANP32 locus of a host can comprise introducing into a cell of the host a ZFN, wherein the ZFN recognizes and binds to a target nucleotide sequence, wherein the target nucleotide sequence is comprised within at least one ANP32 locus of the host. In certain examples, the target nucleotide sequence is not comprised within the genome of the host at any other position than the at least one ANP32 locus. For example, a DNA-binding polypeptide of the ZFN may be engineered to recognize and bind to a target nucleotide sequence identified within the at least one ANP32 locus (e.g., by sequencing the ANP32 locus). A method for the site-specific integration of an exogenous nucleic acid into at least one ANP32 performance locus of a host that comprises introducing into a cell of the host a ZFN may also comprise introducing into the cell an exogenous nucleic acid, wherein recombination of the exogenous nucleic acid into a nucleic acid of the host comprising the at least one ANP32 locus is facilitated by site-specific recognition and binding of the ZFN to the target sequence (and subsequent cleavage of the nucleic acid comprising the ANP32 locus).

### Optional Exogenous Nucleic Acids for Integration at an ANP32 Locus

[0297] Exogenous nucleic acids for integration at an ANP32 locus include: an exogenous nucleic acid for site-specific integration in at least one ANP32 locus, for example and without limitation, an ORF; a nucleic acid comprising a nucleotide sequence encoding a targeting endonuclease; and a vector comprising at least one of either or both of the foregoing. Thus, particular nucleic acids include nucleotide sequences encoding a polypeptide, structural nucleotide sequences, and/or DNA-binding polypeptide recognition and binding sites.

### Optional Exogenous Nucleic Acid Molecules for Site-Specific Integration

[0298] As noted above, insertion of an exogenous sequence (also called a “donor sequence” or “donor” or “transgene”) is provided, for example for expression of a polypeptide, correction of a mutant gene, or for increased expression of a wild-type gene. It will be readily apparent that the donor sequence is typically not identical to the genomic sequence where it is placed. A donor sequence can contain a non-homologous sequence flanked by two regions of homology to allow for efficient homology-directed repair (HDR) at the location of interest. Additionally, donor sequences can comprise a vector molecule containing sequences that are not homologous to the region of interest in cellular chromatin. A donor molecule can contain several, discontinuous regions of homology to cellular chromatin. For example, for targeted insertion of sequences not normally present in a region of interest, said sequences can be present in a donor nucleic acid molecule and flanked by regions of homology to sequence in the region of interest.

[0299] The donor polynucleotide can be DNA or RNA, single-stranded or double-stranded and can be introduced into a cell in linear or circular form. See e.g., U.S. Patent Publication Nos. 2010/0047805, 2011/0281361, 2011/0207221, and 2013/0326645. If introduced in linear form, the ends of the donor sequence can be protected (e.g. from exonucleolytic degradation) by methods known to those of skill in the art. For example, one or more dideoxynucleotide residues are added to the 3′ terminus of a linear molecule and/or self-complementary oligonucleotides are ligated to one or both ends. See, for example, Chang et al. (1987) Proc. Natl. Acad. Sci. USA 84:4959-4963; Nehls et al. (1996) Science 272:886-889. Additional methods for protecting exogenous polynucleotides from degradation include, but are not limited to, addition of terminal amino group(s) and the use of modified internucleotide linkages such as, for example, phosphorothioates, phosphoramidates, and O-methyl ribose or deoxyribose residues.

[0300] A polynucleotide can be introduced into a cell as part of a vector molecule having additional sequences such as, for example, replication origins, promoters and genes encoding antibiotic resistance. Moreover, donor polynucleotides can be introduced as naked nucleic acid, as nucleic acid complexed with an agent such as a liposome or poloxamer, or can be delivered by viruses (e.g., adenovirus, AAV, herpesvirus, retrovirus, lentivirus and integrase defective lentivirus (IDLY)).

[0301] The donor is generally integrated so that its expression is driven by the endogenous promoter at the integration site, namely the promoter that drives expression of the endogenous gene into which the donor is integrated (e.g., ANP32). However, it will be apparent that the donor may comprise a promoter and/or enhancer, for example a constitutive promoter or an inducible or tissue specific promoter.

[0302] Furthermore, although not required for expression, exogenous sequences may also include transcriptional or translational regulatory sequences, for example, promoters, enhancers, insulators, internal ribosome entry sites, sequences encoding 2A peptides and/or polyadenylation signals.

[0303] Exogenous nucleic acids that may be integrated in a site-specific manner into at least one ANP32 locus, so as to modify the ANP32 locus include, for example and without limitation, nucleic acids comprising a nucleotide sequence encoding a polypeptide of interest; nucleic acids comprising an agronomic gene; nucleic acids comprising a nucleotide sequence encoding an RNAi molecule; or nucleic acids that disrupt the ANP32 gene.

[0304] An exogenous nucleic acid can be integrated at a ANP32 locus, so as to modify the ANP32 locus, wherein the nucleic acid comprises a nucleotide sequence encoding a polypeptide of interest, such that the nucleotide sequence is expressed in the host from the ANP32 locus. In some examples, the polypeptide of interest (e.g., a foreign protein) is expressed from a nucleotide sequence encoding the polypeptide of interest in commercial quantities. In such examples, the polypeptide of interest may be extracted from the host cell, tissue, or biomass.

### Nucleic Acid Molecules Comprising a Nucleotide Sequence Encoding a Targeting Endonuclease

[0305] A nucleotide sequence encoding a targeting endonuclease can be engineered by manipulation (e.g., ligation) of native nucleotide sequences encoding polypeptides comprised within the targeting endonuclease. For example, the nucleotide sequence of a gene encoding a protein comprising a DNA-binding polypeptide may be inspected to identify the nucleotide sequence of the gene that corresponds to the DNA-binding polypeptide, and that nucleotide sequence may be used as an element of a nucleotide sequence encoding a targeting endonuclease comprising the DNA-binding polypeptide. Alternatively, the amino acid sequence of a targeting endonuclease may be used to deduce a nucleotide sequence encoding the targeting endonuclease, for example, according to the degeneracy of the genetic code.

[0306] In illustrative nucleic acid molecules comprising a nucleotide sequence encoding a targeting endonuclease, the last codon of a first polynucleotide sequence encoding a nuclease polypeptide, and the first codon of a second polynucleotide sequence encoding a DNA-binding polypeptide, may be separated by any number of nucleotide triplets, e.g., without coding for an intron or a “STOP.” Likewise, the last codon of a nucleotide sequence encoding a first polynucleotide sequence encoding a DNA-binding polypeptide, and the first codon of a second polynucleotide sequence encoding a nuclease polypeptide, may be separated by any number of nucleotide triplets. The last codon (i.e., most 3′ in the nucleic acid sequence) of a first polynucleotide sequence encoding a nuclease polypeptide, and a second polynucleotide sequence encoding a DNA-binding polypeptide, can be fused in phase-register with the first codon of a further polynucleotide coding sequence directly contiguous thereto, or separated therefrom by no more than a short peptide sequence, such as that encoded by a synthetic nucleotide linker (e.g., a nucleotide linker that may have been used to achieve the fusion). Examples of such further polynucleotide sequences include, for example and without limitation, tags, targeting peptides, and enzymatic cleavage sites. Likewise, the first codon of the most 5′ (in the nucleic acid sequence) of the first and second polynucleotide sequences may be fused in phase-register with the last codon of a further polynucleotide coding sequence directly contiguous thereto, or separated therefrom by no more than a short peptide sequence.

[0307] A sequence separating polynucleotide sequences encoding functional polypeptides in a targeting endonuclease (e.g., a DNA-binding polypeptide and a nuclease polypeptide) may, for example, consist of any sequence, such that the amino acid sequence encoded is not likely to significantly alter the translation of the targeting endonuclease. Due to the autonomous nature of known nuclease polypeptides and known DNA-binding polypeptides, intervening sequences will not interfere with the respective functions of these structures.

### Other Knockout Methods

[0308] Various other techniques known in the art can be used to inactivate genes to make knock-out animals and/or to introduce nucleic acid constructs into animals to produce founder animals and to make animal lines, in which the knockout or nucleic acid construct is integrated into the genome. Such techniques include, without limitation, pronuclear microinjection (U.S. Pat. No. 4,873,191), retrovirus mediated gene transfer into germ lines (Van der Putten et al. (1985) Proc. Natl. Acad. Sci. USA 82, 6148-1652), gene targeting into embryonic stem cells (Thompson et al. (1989) Cell 56, 313-321), electroporation of embryos (Lo (1983) Mol. Cell. Biol. 3, 1803-1814), sperm-mediated gene transfer (Lavitrano et al. (2002) Proc. Natl. Acad. Sci. USA 99, 14230-14235; Lavitrano et al. (2006) Reprod. Fert. Develop. 18, 19-23), and in vitro transformation of somatic cells, such as cumulus or mammary cells, or adult, fetal, or embryonic stem cells, followed by nuclear transplantation (Wilmut et al. (1997) Nature 385, 810-813; and Wakayama et al. (1998) Nature 394, 369-374). Pronuclear microinjection, sperm mediated gene transfer, and somatic cell nuclear transfer are particularly useful techniques. An animal that is genomically edited is an animal wherein all of its cells have the edit, including its germ line cells. When methods are used that produce an animal that is mosaic in its modification, the animals may be inbred and progeny that are genomically edited may be selected. Cloning, for instance, may be used to make a mosaic animal if its cells are modified at the blastocyst state, or genomic editing can take place when a single cell is edited. Animals that are edited so they do not sexually mature can be homozygous or heterozygous for the edit, depending on the specific approach that is used. If a particular gene is inactivated by a knockout edit, homozygosity would normally be required. If a particular gene is inactivated by an RNA interference or dominant negative strategy, then heterozygosity is often adequate.

[0309] Typically, in embryo/zygote microinjection, a nucleic acid construct or mRNA is introduced into a fertilized egg; one or two cell fertilized eggs are used as the nuclear structure containing the genetic material from the sperm head and the egg are visible within the protoplasm. Pronuclear staged fertilized eggs can be obtained in vitro or in vivo (i.e., surgically recovered from the oviduct of donor animals). In vitro fertilized eggs can be produced as follows. For example, swine ovaries can be collected at an abattoir, and maintained at 22-28° C. during transport. Ovaries can be washed and isolated for follicular aspiration, and follicles ranging from 4-8 mm can be aspirated into 50 mL conical centrifuge tubes using 18 gauge needles and under vacuum. Follicular fluid and aspirated oocytes can be rinsed through pre-filters with commercial TL-HEPES (Minitube, Verona, Wis.). Oocytes surrounded by a compact cumulus mass can be selected and placed into TCM-199 OOCYTE MATURATION MEDIUM (Minitube, Verona, Wis.) supplemented with 0.1 mg/mL cysteine, 10 ng/mL epidermal growth factor, 10% porcine follicular fluid, 50 μM 2-mercaptoethanol, 0.5 mg/ml cAMP, 10 IU/mL each of pregnant mare serum gonadotropin (PMSG) and human chorionic gonadotropin (hCG) for approximately 22 hours in humidified air at 38.7° C. and 5% CO₂. Subsequently, the oocytes can be moved to fresh TCM-199 maturation medium, which will not contain cAMP, PMSG or hCG and incubated for an additional 22 hours. Matured oocytes can be stripped of their cumulus cells by vortexing in hyaluronidase for 1 minute.

[0310] For swine, mature oocytes can be fertilized in 500 μl Minitube PORCPRO IVF MEDIUM SYSTEM (Minitube, Verona, Wis.) in Minitube 5-well fertilization dishes. In preparation for in vitro fertilization (IVF), freshly-collected or frozen boar semen can be washed and resuspended in PORCPRO IVF Medium to 400,000 sperm. Sperm concentrations can be analyzed by computer assisted semen analysis (SPERMVISION, Minitube, Verona, Wis.). Final in vitro insemination can be performed in a 10 μl volume at a final concentration of approximately 40 motile sperm/oocyte, depending on the boar. All fertilizing oocytes can be incubated at 38.7° C. in 5.0% CO₂ atmosphere for six hours. Six hours post-insemination, presumptive zygotes can be washed twice in NCSU-23 and moved to 0.5 mL of the same medium. This system can produce 20-30% blastocysts routinely across most boars with a 10-30% polyspermic insemination rate.

[0311] Linearized nucleic acid constructs or mRNA can be injected into one of the pronuclei or into the cytoplasm. Then the injected eggs can be transferred to a recipient female (e.g., into the oviducts of a recipient female) and allowed to develop in the recipient female to produce the gene edited animals. In particular, in vitro fertilized embryos can be centrifuged at 15,000×g for 5 minutes to sediment lipids allowing visualization of the pronucleus. The embryos can be injected with using an Eppendorf FEMTOJET injector and can be cultured until blastocyst formation. Rates of embryo cleavage and blastocyst formation and quality can be recorded.

[0312] Embryos can be surgically transferred into uteri of asynchronous recipients. Typically, 100-200 (e.g., 150-200) embryos can be deposited into the ampulla-isthmus junction of the oviduct using a 5.5-inch catheter. After surgery, real-time ultrasound examination of pregnancy can be performed.

[0313] In somatic cell nuclear transfer, a transgenic or gene edited cell such as an embryonic blastomere, fetal fibroblast, adult ear fibroblast, or granulosa cell that includes a nucleic acid construct described above, can be introduced into an enucleated oocyte to establish a combined cell. Oocytes can be enucleated by partial zona dissection near the polar body and then pressing out cytoplasm at the dissection area. Typically, an injection pipette with a sharp beveled tip is used to inject the transgenic or gene edited cell into an enucleated oocyte arrested at meiosis 2. In some conventions, oocytes arrested at meiosis-2 are termed eggs. After producing a porcine or bovine embryo (e.g., by fusing and activating the oocyte), the embryo is transferred to the oviducts of a recipient female, about 20 to 24 hours after activation. See, for example, Cibelli et al. (1998) Science 280, 1256-1258 and U.S. Pat. Nos. 6,548,741, 7,547,816, 7,989,657, or 6,211,429. For pigs, recipient females can be checked for pregnancy approximately 20-21 days after transfer of the embryos.

[0314] Standard breeding techniques can be used to create animals that are homozygous for the inactivated gene from the initial heterozygous founder animals. Homozygosity may not be required, however. Gene edited pigs described herein can be bred with other pigs of interest.

[0315] Once gene edited animals have been generated, inactivation of an endogenous nucleic acid can be assessed using standard techniques. Initial screening can be accomplished by Southern blot analysis to determine whether or not inactivation has taken place. For a description of Southern analysis, see sections 9.37-9.52 of Sambrook et al., 1989, Molecular Cloning, A Laboratory Manual, second edition, Cold Spring Harbor Press, Plainview; N.Y. Polymerase chain reaction (PCR) techniques also can be used in the initial screening. PCR refers to a procedure or technique in which target nucleic acids are amplified. Generally, sequence information from the ends of the region of interest or beyond is employed to design oligonucleotide primers that are identical or similar in sequence to opposite strands of the template to be amplified. PCR can be used to amplify specific sequences from DNA as well as RNA, including sequences from total genomic DNA or total cellular RNA. Primers typically are 14 to 40 nucleotides in length, but can range from 10 nucleotides to hundreds of nucleotides in length. PCR is described in, for example PCR Primer: A Laboratory Manual, ed. Dieffenbach and Dveksler, Cold Spring Harbor Laboratory Press, 1995. Nucleic acids also can be amplified by ligase chain reaction, strand displacement amplification, self-sustained sequence replication, or nucleic acid sequence-based amplified. See, for example, Lewis (1992) Genetic Engineering News 12, 1; Guatelli et al. (1990) Proc. Natl. Acad. Sci. USA 87:1874; and Weiss (1991) Science 254:1292. At the blastocyst stage, embryos can be individually processed for analysis by PCR, Southern hybridization and splinkerette PCR (see, e.g., Dupuy et al. Proc. Nat'l Acad. Sci. USA (2002) 99:4495).

### Interfering RNAs

[0316] A variety of interfering RNA (RNAi) systems are known. Double-stranded RNA (dsRNA) induces sequence-specific degradation of homologous gene transcripts. RNA-induced silencing complex (RISC) metabolizes dsRNA to small 21-23-nucleotide small interfering RNAs (siRNAs). RISC contains a double stranded RNAse (dsRNAse, e.g., Dicer) and ssRNAse (e.g., Argonaut 2 or Ago2). RISC utilizes antisense strand as a guide to find a cleavable target. Both siRNAs and microRNAs (miRNAs) are known. A method of inactivating a gene in a genetically edited animal comprises inducing RNA interference against a target gene and/or nucleic acid such that expression of the target gene and/or nucleic acid is reduced.

[0317] For example, the exogenous nucleic acid sequence can induce RNA interference against a nucleic acid encoding a polypeptide. For example, double-stranded small interfering RNA (siRNA) or small hairpin RNA (shRNA) homologous to a target DNA can be used to reduce expression of that DNA. Constructs for siRNA can be produced as described, for example, in Fire et al. (1998) Nature 391:806; Romano and Masino (1992) Mol. Microbiol. 6:3343; Cogoni et al. (1996) EMBO J. 15:3153; Cogoni and Masino (1999) Nature 399:166; Misquitta and Paterson (1999) Proc. Natl. Acad. Sci. USA 96:1451; and Kennerdell and Carthew (1998) Cell 95:1017. Constructs for shRNA can be produced as described by McIntyre and Fanning (2006) BMC Biotechnology 6:1. In general, shRNAs are transcribed as a single-stranded RNA molecule containing complementary regions, which can anneal and form short hairpins.

[0318] The probability of finding a single, individual functional siRNA or miRNA directed to a specific gene is high. The predictability of a specific sequence of siRNA, for instance, is about 50% but a number of interfering RNAs may be made with good confidence that at least one of them will be effective.

[0319] In vitro cells, in vivo cells, or a genetically edited animal such as an ungulate animal that express an RNAi directed against a gene encoding an ANP32 protein can be used. The RNAi may be, for instance, selected from the group consisting of siRNA, shRNA, dsRNA, RISC and miRNA.

### Inducible Systems

[0320] An inducible system may be used to inactivate an ANP32 gene. Various inducible systems are known that allow spatial and temporal control of inactivation of a gene. Several have been proven to be functional in vivo in porcine animals.

[0321] An example of an inducible system is the tetracycline (tet)-on promoter system, which can be used to regulate transcription of the nucleic acid. In this system, a mutated Tet repressor (TetR) is fused to the activation domain of herpes simplex virus VP 16 trans-activator protein to create a tetracycline-controlled transcriptional activator (tTA), which is regulated by tet or doxycycline (dox). In the absence of antibiotic, transcription is minimal, while in the presence of tet or dox, transcription is induced. Alternative inducible systems include the ecdysone or rapamycin systems. Ecdysone is an insect molting hormone whose production is controlled by a heterodimer of the ecdysone receptor and the product of the ultraspiracle gene (USP). Expression is induced by treatment with ecdysone or an analog of ecdysone such as muristerone A. The agent that is administered to the animal to trigger the inducible system is referred to as an induction agent.

[0322] The tetracycline-inducible system and the Cre/loxP recombinase system (either constitutive or inducible) are among the more commonly used inducible systems. The tetracycline-inducible system involves a tetracycline-controlled transactivator (tTA)/reverse tTA (rtTA). A method to use these systems in vivo involves generating two lines of genetically edited animals. One animal line expresses the activator (tTA, rtTA, or Cre recombinase) under the control of a selected promoter. Another line of animals expresses the acceptor, in which the expression of the gene of interest (or the gene to be altered) is under the control of the target sequence for the tTA/rtTA transactivators (or is flanked by loxP sequences). Mating the two of animals provides control of gene expression.

[0323] The tetracycline-dependent regulatory systems (tet systems) rely on two components, i.e., a tetracycline-controlled transactivator (tTA or rtTA) and a tTA/rtTA-dependent promoter that controls expression of a downstream cDNA, in a tetracycline-dependent manner. In the absence of tetracycline or its derivatives (such as doxycycline), tTA binds to tetO sequences, allowing transcriptional activation of the tTA-dependent promoter. However, in the presence of doxycycline, tTA cannot interact with its target and transcription does not occur. The tet system that uses tTA is termed tet-OFF, because tetracycline or doxycycline allows transcriptional down-regulation. Administration of tetracycline or its derivatives allows temporal control of transgene expression in vivo. rtTA is a variant of tTA that is not functional in the absence of doxycycline but requires the presence of the ligand for transactivation. This tet system is therefore termed tet-ON. The tet systems have been used in vivo for the inducible expression of several transgenes, encoding, e.g., reporter genes, oncogenes, or proteins involved in a signaling cascade.

[0324] The Cre/lox system uses the Cre recombinase, which catalyzes site-specific recombination by crossover between two distant Cre recognition sequences, i.e., loxP sites. A DNA sequence introduced between the two loxP sequences (termed floxed DNA) is excised by Cre-mediated recombination. Control of Cre expression in a transgenic and/or gene edited animal, using either spatial control (with a tissue- or cell-specific promoter), or temporal control (with an inducible system), results in control of DNA excision between the two loxP sites. One application is for conditional gene inactivation (conditional knockout). Another approach is for protein over-expression, wherein a floxed stop codon is inserted between the promoter sequence and the DNA of interest. Genetically edited animals do not express the transgene until Cre is expressed, leading to excision of the floxed stop codon. This system has been applied to tissue-specific oncogenesis and controlled antigene receptor expression in B lymphocytes. Inducible Cre recombinases have also been developed. The inducible Cre recombinase is activated only by administration of an exogenous ligand. The inducible Cre recombinases are fusion proteins containing the original Cre recombinase and a specific ligand-binding domain. The functional activity of the Cre recombinase is dependent on an external ligand that is able to bind to this specific domain in the fusion protein.

[0325] In vitro cells, in vivo cells, or a genetically edited animal such as an ungulate animal that comprises an ANP32 gene under control of an inducible system can be used. The chromosomal modification of an animal may be genomic or mosaic. The inducible system may be, for instance, selected from the group consisting of Tet-On, Tet-Off, Cre-lox, and Hif1 alpha.

### Vectors and Nucleic Acids

[0326] A variety of nucleic acids may be introduced into cells for knockout purposes, for inactivation of a gene, to obtain expression of a gene, or for other purposes. As used herein, the term nucleic acid includes DNA, RNA, and nucleic acid analogs, and nucleic acids that are double-stranded or single-stranded (i.e., a sense or an antisense single strand). Nucleic acid analogs can be modified at the base moiety, sugar moiety, or phosphate backbone to improve, for example, stability, hybridization, or solubility of the nucleic acid. Modifications at the base moiety include deoxyuridine for deoxythymidine, and 5-methyl-2′-deoxycytidine and 5-bromo-2′-doxycytidine for deoxycytidine. Modifications of the sugar moiety include modification of the 2′ hydroxyl of the ribose sugar to form 2′-O-methyl or 2′-O-allyl sugars. The deoxyribose phosphate backbone can be modified to produce morpholino nucleic acids, in which each base moiety is linked to a six membered, morpholino ring, or peptide nucleic acids, in which the deoxyphosphate backbone is replaced by a pseudopeptide backbone and the four bases are retained. See, Summerton and Weller (1997) Antisense Nucleic Acid Drug Dev. 7(3):187; and Hyrup et al. (1996) Bioorgan. Med. Chem. 4:5. In addition, the deoxyphosphate backbone can be replaced with, for example, a phosphorothioate or phosphorodithioate backbone, a phosphoroamidite, or an alkyl phosphotriester backbone.

[0327] The target nucleic acid sequence can be operably linked to a regulatory region such as a promoter. Regulatory regions can be porcine regulatory regions or can be from other species. As used herein, operably linked refers to positioning of a regulatory region relative to a nucleic acid sequence in such a way as to permit or facilitate transcription of the target nucleic acid.

[0328] Any type of promoter can be operably linked to a target nucleic acid sequence. Examples of promoters include, without limitation, tissue-specific promoters, constitutive promoters, inducible promoters, and promoters responsive or unresponsive to a particular stimulus. Suitable tissue specific promoters can result in preferential expression of a nucleic acid transcript in beta cells and include, for example, the human insulin promoter. Other tissue specific promoters can result in preferential expression in, for example, hepatocytes or heart tissue and can include the albumin or alpha-myosin heavy chain promoters, respectively. A promoter that facilitates the expression of a nucleic acid molecule without significant tissue or temporal-specificity can be used (i.e., a constitutive promoter). For example, a beta-actin promoter such as the chicken beta-actin gene promoter, ubiquitin promoter, miniCAGs promoter, glyceraldehyde-3-phosphate dehydrogenase (GAPDH) promoter, or 3-phosphoglycerate kinase (PGK) promoter can be used, as well as viral promoters such as the herpes simplex virus thymidine kinase (HSV-TK) promoter, the SV40 promoter, or a cytomegalovirus (CMV) promoter. For example, a fusion of the chicken beta actin gene promoter and the CMV enhancer can be used as a promoter. See, for example, Xu et al. (2001) Hum. Gene Ther. 12:563; and Kiwaki et al. (1996) Hum. Gene Ther. 7:821.

[0329] Additional regulatory regions that may be useful in nucleic acid constructs, include, but are not limited to, polyadenylation sequences, translation control sequences (e.g., an internal ribosome entry segment, IRES), enhancers, inducible elements, or introns. Such regulatory regions may not be necessary, although they may increase expression by affecting transcription, stability of the mRNA, translational efficiency, or the like. Such regulatory regions can be included in a nucleic acid construct as desired to obtain optimal expression of the nucleic acids in the cell(s). Sufficient expression, however, can sometimes be obtained without such additional elements.

[0330] A nucleic acid construct may be used that encodes signal peptides or selectable markers. Signal peptides can be used such that an encoded polypeptide is directed to a particular cellular location (e.g., the cell surface). Non-limiting examples of selectable markers include puromycin, ganciclovir, adenosine deaminase (ADA), aminoglycoside phosphotransferase (neo, G418, APH), dihydrofolate reductase (DHFR), hygromycin-B-phosphtransferase, thymidine kinase (TK), and xanthin-guanine phosphoribosyltransferase (XGPRT). Such markers are useful for selecting stable transformants in culture. Other selectable markers include fluorescent polypeptides, such as green fluorescent protein or yellow fluorescent protein.

[0331] A sequence encoding a selectable marker can be flanked by recognition sequences for a recombinase such as, e.g., Cre or Flp. For example, the selectable marker can be flanked by loxP recognition sites (34-bp recognition sites recognized by the Cre recombinase) or FRT recognition sites such that the selectable marker can be excised from the construct. See, Orban, et al., Proc. Natl. Acad. Sci. (1992) 89:6861, for a review of Cre/lox technology, and Brand and Dymecki, Dev. Cell (2004) 6:7. A transposon containing a Cre- or Flp-activatable transgene interrupted by a selectable marker gene also can be used to obtain animals with conditional expression of a transgene. For example, a promoter driving expression of the marker/transgene can be either ubiquitous or tissue-specific, which would result in the ubiquitous or tissue-specific expression of the marker in FO animals (e.g., pigs). Tissue specific activation of the transgene can be accomplished, for example, by crossing a pig that ubiquitously expresses a marker-interrupted transgene to a pig expressing Cre or Flp in a tissue-specific manner, or by crossing a pig that expresses a marker-interrupted transgene in a tissue-specific manner to a pig that ubiquitously expresses Cre or Flp recombinase. Controlled expression of the transgene or controlled excision of the marker allows expression of the transgene.

[0332] The exogenous nucleic acid can encode a polypeptide. A nucleic acid sequence encoding a polypeptide can include a tag sequence that encodes a “tag” designed to facilitate subsequent manipulation of the encoded polypeptide (e.g., to facilitate localization or detection). Tag sequences can be inserted in the nucleic acid sequence encoding the polypeptide such that the encoded tag is located at either the carboxyl or amino terminus of the polypeptide. Non-limiting examples of encoded tags include glutathione S-transferase (GST) and FLAG tag (Kodak, New Haven, Conn.).

[0333] Nucleic acid constructs can be methylated using a SssI CpG methylase (New England Biolabs, Ipswich, Mass.). In general, the nucleic acid construct can be incubated with S-adenosylmethionine and SssI CpG-methylase in buffer at 37° C. Hypermethylation can be confirmed by incubating the construct with one unit of HinP1I endonuclease for 1 hour at 37° C. and assaying by agarose gel electrophoresis.

[0334] Nucleic acid constructs can be introduced into embryonic, fetal, or adult animal cells of any type, including, for example, germ cells such as an oocyte or an egg, a progenitor cell, an adult or embryonic stem cell, a primordial germ cell, a kidney cell such as a PK-15 cell, an islet cell, a beta cell, a liver cell, or a fibroblast such as a dermal fibroblast, using a variety of techniques. Non-limiting examples of techniques include the use of transposon systems, recombinant viruses that can infect cells, or liposomes or other non-viral methods such as electroporation, microinjection, or calcium phosphate precipitation, that are capable of delivering nucleic acids to cells.

[0335] In transposon systems, the transcriptional unit of a nucleic acid construct, i.e., the regulatory region operably linked to an exogenous nucleic acid sequence, is flanked by an inverted repeat of a transposon. Several transposon systems, including, for example, Sleeping Beauty (see, U.S. Pat. No. 6,613,752 and U.S. Publication No. 2005/0003542); Frog Prince (Miskey et al. (2003) Nucleic Acids Res. 31:6873); Tol2 (Kawakami (2007) Genome Biology 8(Suppl.1):S7; Minos (Pavlopoulos et al. (2007) Genome Biology 8(Suppl.1):S2); Hsmar1 (Miskey et al. (2007)) Mol. Cell Biol. 27:4589); and Passport have been developed to introduce nucleic acids into cells, including mice, human, and pig cells. The Sleeping Beauty transposon is particularly useful. A transposase can be delivered as a protein, encoded on the same nucleic acid construct as the exogenous nucleic acid, can be introduced on a separate nucleic acid construct, or provided as an mRNA (e.g., an in vitro-transcribed and capped mRNA).

[0336] Insulator elements also can be included in a nucleic acid construct to maintain expression of the exogenous nucleic acid and to inhibit the unwanted transcription of host genes. See, for example, U.S. Publication No. 2004/0203158. Typically, an insulator element flanks each side of the transcriptional unit and is internal to the inverted repeat of the transposon. Non-limiting examples of insulator elements include the matrix attachment region-(MAR) type insulator elements and border-type insulator elements. See, for example, U.S. Pat. Nos. 6,395,549, 5,731,178, 6,100,448, and 5,610,053, and U.S. Publication No. 2004/0203158.

[0337] Nucleic acids can be incorporated into vectors. A vector is a broad term that includes any specific DNA segment that is designed to move from a carrier into a target DNA. A vector may be referred to as an expression vector, or a vector system, which is a set of components needed to bring about DNA insertion into a genome or other targeted DNA sequence such as an episome, plasmid, or even virus/phage DNA segment. Vector systems such as viral vectors (e.g., retroviruses, adeno-associated virus and integrating phage viruses), and non-viral vectors (e.g., transposons) used for gene delivery in animals have two basic components: 1) a vector comprised of DNA (or RNA that is reverse transcribed into a cDNA) and 2) a transposase, recombinase, or other integrase enzyme that recognizes both the vector and a DNA target sequence and inserts the vector into the target DNA sequence. Vectors most often contain one or more expression cassettes that comprise one or more expression control sequences, wherein an expression control sequence is a DNA sequence that controls and regulates the transcription and/or translation of another DNA sequence or mRNA, respectively.

[0338] Many different types of vectors are known. For example, plasmids and viral vectors, e.g., retroviral vectors, are known. Mammalian expression plasmids typically have an origin of replication, a suitable promoter and optional enhancer, necessary ribosome binding sites, a polyadenylation site, splice donor and acceptor sites, transcriptional termination sequences, and 5′ flanking non-transcribed sequences. Examples of vectors include: plasmids (which may also be a carrier of another type of vector), adenovirus, adeno-associated virus (AAV), lentivirus (e.g., modified HIV-1, SIV or FIV), retrovirus (e.g., ASV, ALV or MoMLV), and transposons (e.g., Sleeping Beauty, P-elements, Tol-2, Frog Prince, piggyBac).

[0339] As used herein, the term nucleic acid refers to both RNA and DNA, including, for example, cDNA, genomic DNA, synthetic (e.g., chemically synthesized) DNA, as well as naturally occurring and chemically modified nucleic acids, e.g., synthetic bases or alternative backbones. A nucleic acid molecule can be double-stranded or single-stranded (i.e., a sense or an antisense single strand).

### Founder Animals, Animal Lines, Traits, and Reproduction

[0340] Founder animals may be produced by cloning and other methods described herein. The founders can be homozygous for a gene edit, as in the case where a zygote or a primary cell undergoes a homozygous modification. Similarly, founders can also be made that are heterozygous. In the case of the animals comprising at least one modified chromosomal sequence in a gene encoding an ANP32 protein, the founders are preferably heterozygous. The founders may be genomically edited, meaning that all of the cells in their genome have undergone modification. Founders can be mosaic for a modification, as may happen when vectors are introduced into one of a plurality of cells in an embryo, typically at a blastocyst stage. Progeny of mosaic animals may be tested to identify progeny that are genomically edited. An animal line is established when a pool of animals has been created that can be reproduced sexually or by assisted reproductive techniques, with heterogeneous or homozygous progeny consistently expressing the modification.

[0341] In livestock, many alleles are known to be linked to various traits such as production traits, type traits, workability traits, and other functional traits. Artisans are accustomed to monitoring and quantifying these traits, e.g., Visscher et al., Livestock Production Science, 40 (1994) 123-137, U.S. Pat. No. 7,709,206, US 2001/0016315, US 2011/0023140, and US 2005/0153317. An animal line may include a trait chosen from a trait in the group consisting of a production trait, a type trait, a workability trait, a fertility trait, a mothering trait, and a disease resistance trait. Further traits include expression of a recombinant gene product.

[0342] In addition to monitoring traits, artisans can look at the genetic background of the animal as the whole. Genomic edits such as those of the present teachings may be made in elite genetic backgrounds. Elite PIC™ (Pig Improvement Company, Limited, Basingstoke, UK) lines 2, 3, 15, 19, 27, 62 and 65 are lines selected for superior commercial phenotypes. Fibroblast cell lines were grown from collagenase treated ear notch samples extracted from the animals from these cell lines deposited with the American Type Culture Collection (ATCC®). The ATCC® has an address of 10801 University Boulevard, Manassas, VA 20110-2209. A representative sample of PIC™ Line 2 was deposited with the ATCC on Apr. 3, 2019 and assigned ATTC® Patent Deposit Number PTA-125814. A representative sample of PIC™ Line 3 was deposited with the ATCC on Apr. 3, 2019 and assigned ATTC® Patent Deposit Number PTA-125815. A representative sample of PIC™ Line 15 was deposited with the ATCC on Apr. 3, 2019 and assigned ATTC® Patent Deposit Number PTA-125816. A representative sample of PIC™ Line 65 was deposited with the ATCC® on Apr. 3, 2019 and assigned ATTC® Patent Deposit Number PTA-125813. A representative sample of PIC™ Line 19 was deposited with the ATCC ° on Apr. 3, 2019 and assigned ATTC® Patent Deposit Number PTA-125811. A representative sample of PIC™ Line 27 was deposited with the ATCC on Apr. 3, 2019 and assigned ATTC® Patent Deposit Number PTA-125907. A representative sample of PIC™ Line 62 was deposited with the ATCC on Apr. 3, 2019 and assigned ATTC® Patent Deposit Number PTA-125812. Each deposit was made according to the Budapest Treaty. Upon issuance, all restrictions on the availability to the public of the deposit will be irrevocably removed consistent with all of the requirements of the Budapest Treaty and 37 C.F.R. §§ 1.801-1.809. Applicant does not waive any infringement of rights granted under this patent.

[0343] Other potential porcine lines include lines can be PIC™ Line 15, PIC™ Line 17, PIC™ Line 27, PIC™ Line 65, PIC™ Line 14, PIC™ Line 62, PIC337, PIC800, PIC280, PIC327, PIC408, PIC™ 399, PIC410, PIC415, PIC359, PIC380, PIC837, PIC260, PIC265, PIC210, PIC™ Line 2, PIC™ Line 3, PIC™ Line 4, PIC™ Line 5, PIC™ Line 18, PIC™ Line 19, PIC™ Line 92, PIC95, PIC™ CAMBOROUGH® (Pig Improvement Company, Limited, Basingstoke, UK), PIC1070, PIC™ CAMBOROUGH® 40, PIC™ CAMBOROUGH® 22, PIC1050, PIC™ CAMBOROUGH® 29, PIC™ CAMBOROUGH® 48, or PIC™ CAMBOROUGH® x54.

[0344] In various aspects, PIC™ Line 65 is sold under the trade name PIC337. In various aspects, PIC™ line 62 is sold under the tradename PIC408. In various aspects, hybrid pigs made by crossing PIC™ lines 15 and 17 are sold under the tradenames PIC800 or PIC280. In various aspects, PIC™ Line 27 is sold under the tradename PIC327. In various aspects, hybrids created from crossing PIC™ Line 65 and PIC™ Line 62 are sold under the tradenames PIC399, PIC410, or PIC415. In various aspects, hybrids created from crossing PIC™ Line 65 and Pic Line 27 are sold under the tradename PIC359. In various aspects, hybrids prepared from crossing PIC™ Line 800 pigs (which is a hybrid of PIC™ Line 15 and PIC™ Line 17) to PIC™ Line 65 pigs are sold under the tradenames PIC380 or PIC837. In various aspects, PIC™ Line 14 is sold under the trade name PIC260. In various aspects, hybrids created from crossing PIC™ Line 14 and PIC™ Line 65 are sold under the tradename PIC265. In various aspects, hybrids created by crossing PIC™ Line 2 and PIC™ Line 3 are sold under the tradenames PIC210, PIC™ CAMBOROUGH®, and PIC1050. In various aspects, hybrids of PIC™ Line 3 and PIC™ Line 92 are sold under the tradename PIC95. In various configurations, hybrids made from crossing PIC™ Line 19 and PIC™ Line 3 are sold under the tradename PIC1070. In various aspects, hybrids created by crossing PIC™ Line 18 and PIC™ Line 3 are sold under the tradename PIC™ CAMBOROUGH® 40. In various aspects, hybrids created from crossing PIC™ Line 19 and PIC1050 (which is itself a hybrid of PIC™ lines 2 and 3) are sold under the tradename PIC™ CAMBOROUGH® 22. In various aspects, hybrids created from crossing PIC™ Line 2 and PIC1070 (which is itself a hybrid of PIC™ lines 19 and 3) are sold under the tradename PIC™ CAMBOROUGH® 29. In various aspects, hybrids created from crossing PIC™ Line 18 and PIC1050 (which is itself a hybrid of PIC™ lines 2 and 3) are sold under the tradename PIC™ CAMBOROUGH® 48. In various aspects, hybrids created from crossing PIC™ Line 4 and PIC™ Line 5 are sold under the tradename PIC™ CAMBOROUGH® x54.

[0345] Animals with a desired trait or traits may be modified to prevent their sexual maturation. Since the animals are sterile until matured, it is possible to regulate sexual maturity as a means of controlling dissemination of the animals. Animals that have been bred or modified to have one or more traits can thus be provided to recipients with a reduced risk that the recipients will breed the animals and appropriate the value of the traits to themselves. For example, the genome of an animal can be modified, wherein the modification comprises inactivation of a sexual maturation gene, wherein the sexual maturation gene in a wild type animal expresses a factor selective for sexual maturation. The animal can be treated by administering a compound to remedy a deficiency caused by the loss of expression of the gene to induce sexual maturation in the animal.

[0346] Breeding of animals that require administration of a compound to induce sexual maturity may advantageously be accomplished at a treatment facility. The treatment facility can implement standardized protocols on well-controlled stock to efficiently produce consistent animals. The animal progeny may be distributed to a plurality of locations to be raised. Farms and farmers (a term including a ranch and ranchers) may thus order a desired number of progeny with a specified range of ages and/or weights and/or traits and have them delivered at a desired time and/or location. The recipients, e.g., farmers, may then raise the animals and deliver them to market as they desire.

[0347] A genetically edited ungulate animal having an inactivated sexual maturation gene can be delivered (e.g., to one or more locations, to a plurality of farms). The animals can have an age of between about 1 day and about 180 days. The animal can have one or more traits (for example one that expresses a desired trait or a high-value trait or a novel trait or a recombinant trait).

### Detection of Edited Pigs

[0348] One useful method of detecting the desired edit is to use real-time PCR. PCR primers flanking the region of interest and a probe that specifically anneals to the region of interest are designed. The probe is labelled with both a fluorophore and a quencher. The probe can have 50%, 60%, 70%, 80%, 90%, 95%, or 100% homology with the desired sequence. In the PCR reaction, the primers and probe hybridize in a sequence-dependent manner to the complementary DNA strand of the region of interest. Because the probe is intact, the fluorophore and quencher are in close proximity and the quencher absorbs fluorescence emitted by the fluorophore. The polymerase extends from the primers and begins DNA synthesis. When the polymerase reaches the probe, the exonuclease activity of the polymerase cleaves the hybridized probe. As a result of cleavage, the fluorophore is separated from the quencher and fluoresces. This fluorescence is detected by the real time instrument. These steps are repeated for each PCR cycle and allow detection of specific products.

[0349] For example, three separate sets of primers and probes can be designed for two assays. Each assay can have two sets of primers. The first set of primers can flank the unedited genomic sequence of a gRNA used in an edit (SEQ ID NOs: 26 or 19 for ANP32A or SEQ ID NOs: 55 and 59 for ANP32B) and a probe which binds to the unedited genomic DNA in between the primers. The probe can be 50%, 60%, 70%, 80%, 90%, 95%, or 100% homologous to the unedited genomic sequence between the primers. There can be a separate set for each guide RNA used in the edit. The final sets of primers can flank the desired exogenous stop codon created by excision of the sequence between the cut sites of the guides. A probe can be designed to bind the desired edit in between these primers with 50%, 60%, 70%, 80%, 90%, 95%, or 100% homology to the desired edit. A commercial real-time PCR kit can then be used to probe various animals for the desired edit. A variety of commercial real-time PCR kits exist including, such as, but without limitation, PRIMETIME® from IDT, TAQMAN® (Roche Molecular Systems, Inc, Pleasonton, CA) from Applied Biosystems, and various kits from Qiagen and Bio-Rad. Skilled persons will recognize that any such kit can be used with the primers and methods of the present teachings to achieve like results.

[0350] Having described the invention in detail, it will be apparent that modifications and variations are possible without departing from the scope of the invention defined in the appended claims.

### EXAMPLES

[0351] The following non-limiting examples are provided to further illustrate the present invention.

### Example 1. Generation of Pigs Having Edited ANP32 Genes

[0352] To generate pigs having edited ANP32 genes, editing strategies were designed to introduce stop codons into the porcine ANP32A and ANP32B genes in conserved exonic sequences upstream of the coding region that codes for N129 and D130. The ANP32A and ANP32B guide RNAs listed above in Tables 6 and 7 will be assessed for on- and off-target activity in porcine fibroblasts.

[0353] ANP32A has two transcripts: ENSSSCT00000070641.1 and ENSSSCT00000005475.4. Guides in the conserved region of exon 2 (chr1: 166,671,648-166,671,797) and exon 3 (chr1: 166,671,387-166,671,509) will be tested for on-target activity.

[0354] ANP32B (NANS) has seven transcripts: ENSSSCT00000062686.2, ENSSSCT00000055524.2, ENSSSCT00000068404.1, ENSSSCT00000045745.2, ENSSSCT00000005912.4, ENSSSCT00000054395.2, and ENSSSCT00000044227.2. Guides in exon 2 (chr1:239,852,885-239,853,034) and exon 3 (chr1: 239,856,334-239,856,456) will be tested for on-target activity.

[0355] These data will be then used to select CRISPR reagents to generate knockout animals by zygote microinjection and embryo transfer.

[0356] Pigs having a knockout of ANP32A alone, ANP32B alone, or both ANP32A and ANP32B will be generated. These animals will be assessed to confirm that they have the desired gene edit and will then be evaluated for resistance to IAV infection. Resistance to IAV infection will be assessed in vitro using fibroblast cells obtained from the animals and in live animals. The cells and animals will be exposed to a variety of IAVs in order to assess resistance.

### Example 2. Use of gRNA Pairs to Introduce Premature Stop Codons into the Coding Regions of ANP32A and ANP32B

[0357] This example demonstrates the use of gRNA pairs to introduce premature stop codons into the coding regions of ANP32A and ANP32B. The introduction of premature stop codons in ANP32A and ANP32B will create truncated and non-functional proteins, or could initiate nonsense-mediated mRNA decay resulting in elimination of ANP32A and ANP32B mRNA transcripts. Stop codons can be introduced via the homology directed repair (HDR) pathway by inclusion of a single-stranded DNA template in editing experiments. However, single-stranded DNA can integrate randomly in the genome. Therefore, it would be advantageous to identify gRNA pairs that result in-frame stop codons, without the introduction of non-wildtype amino acids. To accomplish this, two gRNAs can be used to direct nuclease cut sites, which are then repaired by NHEJ in an end-to-end manner.

[0358] Guides within ANP32A and ANP32B were tested computationally for their ability to generate in-frame stop codons when paired. Computational predictions were subsequently tested in porcine fetal fibroblasts, as described below. The gRNAs listed in Table 8 below were generated by in vitro transcription and complexed with SpyCas9 in water, using 3.2 μg of Cas9 protein and 2.2 μg of gRNA in a total volume of 2.23 μl. Half volumes (1.115 μl) of the resulting ribonucleoprotein (RNP) complexes were then combined 1:1 in a total volume of 2.23 μl to generate pairs, as indicated in Table 8, and nucleofected into porcine fetal fibroblasts (PFFs) using a Lonza electroporator. In preparation for nucleofection, PFF cells were harvested using TRYPLE EXPRESS™ (ThermoFisher Scientific, Waltham, MA, recombinant Trypsin). Specifically, the culture medium was removed from cells, cells were washed once with Hank's Balanced Salt Solution (HBSS) or Dulbecco's Phosphate-Buffered Saline (DPBS), and incubated for 3-5 minutes at 38.5° C. in the presence of TrypLE. Cells were then harvested with complete medium. Cells were pelleted via centrifugation (300 g×5 minutes at room temperature), supernatant was discarded, and then the cells were resuspended in 10 mL PBS to obtain single cell suspensions to allow cell counting using trypan blue staining. After counting, cells were pelleted via centrifugation, the supernatant was discarded, and the cells were resuspended in nucleofection buffer P3 at a final concentration of 7.5×10⁶ cells/ml. 20 μl of the cell suspension was added to each well of a nucleofection cuvette containing the RNP mixture and then mixed gently to resuspend the cells. The RNP/cell mixture was then nucleofected with program CM138. Following nucleofection, 80 μl of warm Embryonic Fibroblast Medium (EFM) [Dulbecco's Modified Eagle's Medium (DMEM) containing 2.77 mM glucose, 1.99 mM L-glutamine, and 0.5 mM sodium pyruvate, supplemented with 100 μM 2-Mercaptoethanol, 1× Eagle's minimum essential medium non-essential amino acids (MEM NEAA), 100 μg/mL Penicillin-Streptomycin, and 12% Fetal Bovine Serum] was added to each well. The suspensions were mixed gently by pipetting, and then 100 μl were transferred to a 12-well plate containing 900 μl of EFM pre-incubated at 38.5° C. The plate was then incubated at 38.5° C., 5% CO₂ for 48 hours. Forty-eight hours after nucleofection, genomic DNA was prepared from transfected and control PFF cells. Specifically, 15 μl of QUICKEXTRACT™ DNA Extraction Solution (Lucigen Corporation, Middleton, WI) were added to pelleted cells, and the cells were then lysed by incubating for 10 minutes at 37° C., for 8 minutes at 65° C., and for 5 minutes at 95° C. Lysate was held at 4° C. until used for DNA sequencing.

[0359] To evaluate NHEJ repair outcomes at ANP32A and ANP32B target sites mediated by the guide RNA/Cas endonuclease system, a region of approximately 250 bp of genomic DNA surrounding the target site was amplified by PCR and the PCR product was then examined by amplicon deep sequencing for the presence and nature of repairs. After transfection in triplicate, PFF genomic DNA was extracted and the region surrounding the intended target site was PCR amplified with NEB Q5 Polymerase adding sequences necessary for amplicon-specific barcodes and Illumina sequencing using “tailed” primers through two rounds of PCR, respectively. The resulting PCR amplifications were deep sequenced on an Illumina MiSeq Personal Sequencer. The resulting reads were examined for the presence and nature of repairs at the expected sites of cleavage by comparison to control experiments where the Cas9 protein and guide RNA were omitted from the transfection or by comparison to the reference genome. To calculate the frequency of NHEJ mutations for a target site/Cas9 protein/guide RNA combination, the total number of mutant reads (amplicon sequences containing insertions or deletions when compared to the DNA sequences from control treatments or reference genome) was divided by total read number (wild-type plus mutant reads) of an appropriate length containing a perfect match to the barcode and forward primer. Total read counts averaged approximately 7000 per sample and NHEJ activity is expressed as the average (n=3) mutant fraction in Table 8.

[0360] A subset of gRNA pairs screened in porcine fetal fibroblasts were additionally tested for their ability to introduce a premature stop codon in the ANP32A and ANP32B coding regions in porcine embryos. The subset of guides to be tested in porcine embryos was chosen based on their efficacy in generating premature stop codons in porcine fibroblasts. Edited porcine embryos were generated as described below. Briefly, oocytes recovered from slaughterhouse ovaries were in vitro fertilized. The sgRNP solution was injected into the cytoplasm of presumptive zygotes at 16-17 hours post-fertilization by using a single pulse from a FemtoJet 4i microinjector (Eppendorf; Hamburg, Germany) with settings at pi=200 hPa, ti=0.25 s, pc=15 hPa. Glass capillary pipettes with an outer diameter of 1.2 mm and an inner diameter of 0.94 mm were pulled to a very fine point of <0.5 μm (Sutter Instrument, Navato, CA, USA). Microinjection was performed in TL-Hepes (ABT360, LLC) supplemented with 3 mg/ml BSA (Proliant) on the heated stage of an inverted microscope equipped with Narishige (Narishige International USA, Amityville, NY) micromanipulators. Following injections, presumptive zygotes were cultured for 7 days in BO-IVC (IVF Bioscience, Falmouth, Cornwall, UK) in an incubator environment of 5% CO₂, 5% O₂, 90% N₂. Mutation frequency of blastocysts was determined by Illumina sequencing as described for fetal fibroblasts above. The frequencies of end-to-end NHEJ repairs resulting in premature stop codons in ANP32A and ANP32B are shown in Table 8.

[0361] This example demonstrates that the porcine ANP32A and ANP32B gene nucleotide sequences can be edited through the stimulation of double-strand breaks mediated by transfecting Cas9 protein with paired guide RNAs to create a de novo in-frame stop codon.

TABLE 8
Use of gRNA pairs to introduce premature stop codons
into the coding regions of ANP32A and ANP32B

| | | | Freq. desired | Freq. desired edit |
|---|---|---|---|---|
| Gene | Guide 1 | Guide 2 | edit PFFs (%) | embryos(%) |
| ANP32A | SEQ ID NO: 33 | SEQ ID NO: 36 | 0 | Not tested |
| ANP32A | SEQ ID NO: 33 | SEQ ID NO: 40 | 63.7 | 6.2 |
| ANP32A | SEQ ID NO: 15 | SEQ ID NO: 22 | 42.7 | Not tested |
| ANP32A | SEQ ID NO: 15 | SEQ ID NO: 23 | 22.3 | Not tested |
| ANP32A | SEQ ID NO: 16 | SEQ ID NO: 24 | 11.7 | Not tested |
| ANP32A | SEQ ID NO: 17 | SEQ ID NO: 24 | 14.3 | Not tested |
| ANP32A | SEQ ID NO: 19 | SEQ ID NO: 26 | 54 | 48.5 |
| ANP32B | SEQ ID NO: 44 | SEQ ID NO: 46 | 17 | 8.0 |
| ANP32B | SEQ ID NO: 55 | SEQ ID NO: 58 | 65 | 29.3 |
| ANP32B | SEQ ID NO: 55 | SEQ ID NO: 59 | 71.7 | 36.8 |

### Example 3 Editing of Pigs to Introduce Premature Stop Codons

[0362] Porcine oocytes were isolated, fertilized, and then the resulting zygotes are edited to generate gene edited pigs.

[0363] RNP complexes were microinjected into the cytoplasm of in vivo or in vitro fertilized porcine one-cell zygotes. These zygotes were then incubated to generate edited multicellular embryos and transferred to surrogate gilts via standard methods to birth gene edited pigs. To prepare embryo donors and surrogates, pubertal gilts from PIC™ Line 2, Line 3, Line 15, and Line 65 were subjected to estrus synchronization by treatment with altrenogest solution (20-36 mg/animal) for 14 days. Follicular growth was induced by the administration of PMSG 36 hours following the last dose of Matrix, and ovulation was induced by the administration of hCG 82 hours after PMSG administration. To generate in vivo fertilized zygotes, females in standing heat were then artificially inseminated (AI) with boar semen from the corresponding PIC™ line. In vivo derived zygotes were recovered surgically 12-24 hours after AI by retrograde flushing the oviduct with sterile TL-HEPES medium supplemented with 0.3% BSA (w/v). Fertilized zygotes were subjected to a single 2-50 picoliter (pl) cytoplasmic injection of Cas9 protein and guide RNA complex (25-50 ng/μl and 12.5-35 ng/μl) targeting ANP32 and cultured in PZM5 medium (Yoshioka, K., et al., Biol. Reprod., 2002, 60: 112-119; Suzuki, C., et al., Reprod. Fertil. Dev., 2006 18, 789-795; Yoshioka, K., J. Reprod. Dev. 2008, 54, 208-213). Injected zygotes were surgically implanted into the oviducts of estrus synchronized, un-mated surrogate females by a mid-line laparotomy under general anesthesia (each surrogate received 20-60 injected embryos).

[0364] In vitro fertilized embryos for gene editing were derived from non-fertilized PIC™ oocytes. Immature oocytes from estrus synchronized PIC™ gilts were collected from medium size (3-6 mm) follicles. Oocytes with evenly dark cytoplasm and intact surrounding cumulus cells were then selected for maturation. Cumulus oocyte complexes were placed in a well containing 500 μl of maturation medium, TCM-199 (Invitrogen) with 3.05 mM glucose, 0.91 mM sodium pyruvate, 0.57 mM cysteine, 10 ng/ml EGF, 0.5 μg/ml luteinizing hormone (LH), 0.5 μg/ml FSH, 10 ng/ml gentamicin (Sigma), and 10% follicular fluid for 42-44 h at 38.5° C. and 5% CO₂, in humidified air. At the end of the maturation, the surrounding cumulus cells were removed from the oocytes by vortexing for 3 min in the presence of 0.1% hyaluronidase. Then, in vitro matured oocytes were placed in 100 μl droplets of IVF medium (modified Tris-buffered medium containing 113.1 mM NaCl, 3 mM KCl, 7.5 mM CaCl₂, 11 mM glucose, 20 mM Tris, 2 mM caffeine, 5 mM sodium pyruvate, and 2 mg/ml bovine serum albumin (BSA)) in groups of 25-30 oocytes and were fertilized according to established protocol (Abeydeera, Biol. Reprod., 57:729-734, 1997) using fresh extended boar semen. One ml of extended semen was mixed with Dulbecco's Phosphate Buffered Saline (DPBS) containing 1 mg/ml BSA to a final volume of 10 ml and centrifuged at 1000×g, 25° C. for 4 minutes, and spermatozoa were washed in DPBS three times. After the final wash, spermatozoa were re-suspended in mTBM medium and added to oocytes at a final concentration of 1×10 5 spermatozoa/ml, and co-incubated for 4-5 h at 38.5° C. and 5% CO₂. Presumptive zygotes were microinjected 5 hours post IVF and transferred to a surrogate female after 18-42 hours (1-4 cell stage). Each surrogate receives injected embryos. Pregnancies were confirmed by lack of return to estrus (21 days) and ultrasound at 28 days post embryo transfer.

[0365] To establish the frequency of Cas9-guide RNA targeted gene editing in porcine embryos, uninjected control zygotes and injected surplus zygotes generated by in vitro fertilization were cultivated in PZM3 or PZM5 medium at 38.5° C. for 5-7 days. Blastocysts were harvested at day 7 post cultivation and the genomic DNA isolated for next generation sequencing.

### Example 4 Molecular Characterization of Gene Edited Pigs

[0366] This example illustrates the molecular characterization of edited animal genomes.

[0367] A tissue sample was taken from an animal whose genome was been edited according to the examples herein. Tail, ear notch, or blood samples were suitable tissue types. The tissue sample was frozen at −20° C. within 1 hour of sampling to preserve integrity of the DNA in the tissue sample.

[0368] DNA was extracted from tissue samples after proteinase K digestion in lysis buffer. Characterization was performed on two different sequence platforms, short sequence reads using the ILLUMINA® platform (ILLUMINA®, San Deigo, CA) and long sequence reads on an Oxford NANOPORE™ platform (Oxford NANOPORE™ Technologies, Oxford, UK).

[0369] For short sequence reads, two-step PCR was used to amplify and sequence the region of interest. The first step was a locus-specific PCR which amplified the locus of interest from the DNA sample using a combined locus-specific primer with a vendor-specific primer. The second step attached the sequencing index and adaptor sequences to the amplicon from the first step so that sequencing could occur.

[0370] The locus-specific primers for the first step PCR were chosen so that they amplified a region <300 bp such that ILLUMINA® paired-end sequencing reads could span the amplified fragment. Multiple amplicons were preferred to provide redundancy should deletions or naturally occurring point mutations prevent primers from correctly binding. Sequence data for the amplicon was generated using an ILLUMINA® sequencing platform (MISEQ®, ILLUMINA®, San Diego, CA). Sequence reads are analyzed to characterize the outcome of the editing process.

[0371] For long sequence reads, two-step PCR was used to amplify and sequence the region of interest. The first step is a locus-specific PCR which amplified the locus of interest from the DNA sample using a combined locus-specific primer with a vendor-specific adapter. The second step PCR attached the sequencing index to the amplicon from the first-step PCR so that the DNA was ready for preparing a sequencing library. The step 2 PCR products underwent a set of chemical reactions from a vendor kit to polish the ends of the DNA and ligate on the adapter containing the motor protein to allow access to the pores for DNA strand-based sequencing.

[0372] The locus specific primers for the first step PCR range were designed to amplify different regions of the ANP32 gene and amplified regions differed in length. Normalized DNA is then mixed with vendor supplied loading buffer and is loaded onto the NANOPORE™ flowcell.

[0373] Long sequence reads, while having lower per base accuracy than short reads, are very useful for observing the long range context of the sequence around the target site.

### Example 5 Challenge of ANP32A Gene Edited Pigs with Influenza Virus

[0374] This example illustrates ANP32A edited pigs challenged with influenza virus.

[0375] PIC™ pigs were edited using guide RNAs SEQ ID NO: 26 and SEQ ID NO:19 as described in example 3 to create pigs having an edited ANP32A gene comprising SEQ ID NO: 7577. Edits were confirmed as described in Example 4. Edited pigs will be crossbred to create pigs that are homozygous for the edit. These homozygous edited pigs will be inoculated with influenza virus, administered both intramuscularly and intranasally. Serum samples will be obtained on Day 0 (prior to inoculation on that day), Day 3, Day 5, Day 10, Day 14, and Day 21. Realtime PCR will be performed using standard kits to determine the presence of virus in the serum samples according to manufacturer directions.

### Example 6 Challenge of ANP32B Gene Edited Pigs with Influenza Virus

[0376] This example illustrates ANP32B edited pigs challenged with influenza virus.

[0377] PIC™ pigs were edited using guide RNAs SEQ ID NO: 55 and SEQ ID NO:59 as described in example 3 to create pigs having an edited ANP32B gene comprising SEQ ID NO: 7578. Edits were confirmed as described in Example 4. Edited pigs will be crossbred to create pigs that are homozygous for the edit. These homozygous edited pigs will be inoculated with influenza virus, administered both intramuscularly and intranasally. Serum samples will be obtained on Day 0 (prior to inoculation on that day), Day 3, Day 5, Day 10, Day 14, and Day 21. Realtime PCR will be performed using standard kits to determine the presence of virus in the serum samples according to manufacturer directions.

### Example 7 Assay for Real Time PCR Verification of Desired ANP32A Edit

[0378] There will be two assays created for the ANP32 edit detection using real time PCR (rtPCR). For the first assay, two sets of primers and two probes will be designed. One set of primers will flank the spacer sequence set forth in SEQ ID NO: 26. A probe, labeled with a fluorescent moiety, will be designed to anneal to the unedited version of the spacer sequence. The other set of primers will be designed to flank the desired edit sequence (SEQ ID NO: 7577). A probe, labeled with a different fluorescent moiety, will be designed to anneal to nucleotides spanning the joining region of the edit. For validation, real time PCR will be performed using a commercial kit using DNA isolated from pigs of confirmed status from sequencing, and fluorescence will be charted. Validation will occur if, as expected, the homozygotes are close to the y axis (representing the fluorescent moiety for the probe annealing to SEQ ID NO: 7577), the heterozygotes group near the center of the chart, and the wild type pigs group close to the X axis (representing the fluorescent moiety for the probe annealing to SEQ ID NO: 26).

[0379] For the second assay, two sets of primers and two probes will also be designed. One set of primers will flank the spacer sequence set forth in SEQ ID NO: 19. A probe, labeled with a fluorescent moiety, will be designed to anneal to the unedited version of the spacer sequence. The other set of primers will be designed to flank the desired edit sequence (SEQ ID NO: 7577)—these may be the same primers and probe used for the first assay. A probe, labeled with a different fluorescent moiety, will be designed to anneal to nucleotides spanning the joining region of the edit. For validation, real time PCR will be performed using a commercial kit using DNA isolated from pigs of confirmed status from sequencing, and fluorescence will be charted. Validation will occur if, as expected, the homozygotes are close to they axis (representing the fluorescent moiety for the probe annealing to SEQ ID NO: 7577), the heterozygotes group near the center of the chart, and the wild type pigs group close to the X axis (representing the fluorescent moiety for the probe annealing to SEQ ID NO: 19).

### Example 8 Assay for Real Time PCR Verification of Desired ANP32B Edit

[0380] There will be two assays created for the ANP32B edit detection using real time PCR (rtPCR). For the first assay, two sets of primers and two probes will be designed. One set of primers will flank the spacer sequence set forth in SEQ ID NO: 55. A probe, labeled with a fluorescent moiety, will be designed to anneal to the unedited version of the spacer sequence. The other set of primers will be designed to flank the desired edit sequence (SEQ ID NO: 7578). A probe, labeled with a different fluorescent moiety, will be designed to anneal to nucleotides spanning the joining region of the edit. For validation, real time PCR will be performed using a commercial kit using DNA isolated from pigs of confirmed status from sequencing, and fluorescence will be charted. Validation will occur if, as expected, the homozygotes are close to the y axis (representing the fluorescent moiety for the probe annealing to SEQ ID NO: 7578), the heterozygotes group near the center of the chart, and the wild type pigs group close to the X axis (representing the fluorescent moiety for the probe annealing to SEQ ID NO: 55).

[0381] For the second assay, two sets of primers and two probes will be designed. One set of primers will flank the spacer sequence set forth in SEQ ID NO: 59. A probe, labeled with a fluorescent moiety, will be designed to anneal to the unedited version of the spacer sequence. The other set of primers will be designed to flank the desired edit sequence (SEQ ID NO: 7578)—these may be the same primers and probe used for the first ANP32B assay. A probe, labeled with a different fluorescent moiety, will be designed to anneal to nucleotides spanning the joining region of the edit. For validation, real time PCR will be performed using a commercial kit using DNA isolated from pigs of confirmed status from sequencing, and fluorescence will be charted. Validation will occur if, as expected, the homozygotes are close to the y axis (representing the fluorescent moiety for the probe annealing to SEQ ID NO:P 7578), the heterozygotes group near the center of the chart, and the wild type pigs group close to the X axis (representing the fluorescent moiety for the probe annealing to SEQ ID NO: 59).

[0382] In view of the above, it will be seen that the several objects of the invention are achieved and other advantageous results attained.

[0383] As various changes could be made in the above products and methods without departing from the scope of the invention, it is intended that all matter contained in the above description and shown in the accompanying drawings shall be interpreted as illustrative and not in a limiting sense.

### REFERENCES

[0384] Baker et al., ANP32B, or not to be, that is the question for influenza virus, ELIFE 8:e48084 (2019).
[0385] Centers for Disease Control and Prevention (CDC), CDC Estimates of 2009 H1N1 Cases and Related Hospitalizations and Deaths from April 2009 through Mar. 13, 2010, By Age Group, https://www(dot)cdc(dot)gov/h1n1flu/pdf/graph March %202010.pdf (2010).
[0386] Centers for Disease Control and Prevention (CDC), What People Who Raise Pigs Need To Know About Influenza (Flu), https://www(dot)cdc(dot)gov/flu/swineflu/people-raise-pigs-flu.htm (2014).
[0387] Center for Food Security & Public Health (CFSPH), Swine Influenza, http://www(dot)cfsph(dot)iastate(dot)edu/Factsheets/pdfs/swine_influenza.pdf (2016)
[0388] Rajao et al., Pathogenesis and Vaccination of Influenza A Virus in Swine, CURRENT TOPICS IN MICROBIOLOGY AND IMMUNOLOGY 385: 307-326 (2014).
[0389] Reilly et al., Cracking the ANP32 whips: Important functions, unequal requirement, and hints at disease implications, BIOESSAYS 36(11):1062-1071 (2014).
[0390] Sandbulte et al., Optimal Use of Vaccines for Control of Influenza A Virus in Swine, VACCINES 3:22-73 (2015).
[0391] Smith et al., Origins and evolutionary genomics of the 2009 swine-origin HINT influenza A epidemic, NATURE 459:1122-1126 (2009).
[0392] Staller et al., ANP32 Proteins Are Essential for Influenza Virus Replication in Human Cells, J. VIROLOGY 93(17): e00217-19 (2019).

[0393] All publications cited herein are hereby incorporated by reference, each in their entirety.

1. A pig having a genome comprising a gene edited endogenous ANP32 gene, comprising an ANP32A gene or an ANP32B gene, wherein the ANP32 gene comprises a premature stop codon relative to a wild-type gene.

2. The pig according to claim 1, wherein the premature stop codon is upstream of N129 and D130.

3. The pig according to claim 1, wherein the gene edited endogenous ANP32 gene comprises SEQ ID NO: 7577 or SEQ ID NO: 7578.

4. The pig according to claim 1, wherein the premature stop codon confers resistance to an influenza virus.

5. The pig according to claim 4, wherein the influenza virus comprises a type A influenza virus.

6. The pig according to claim 5, wherein the type A influenza virus comprises an H1N1 subtype virus, an H1N2 subtype virus, or an H3N2 subtype virus.

7. The pig according to claim 1, wherein the pig is heterozygous for the gene edited endogenous ANP32 gene.

8. The pig according to claim 1, wherein the pig is homozygous for the gene edited endogenous ANP32 gene.

9. A cell isolated from the pig of claim 1.

10. An isolated cell line obtained from the pig of claim 1.

11. An isolated cell line according to claim 10, wherein the isolated cell line is an isolated fibroblast line.

12. A pair of guide RNAs (gRNAs) for editing a pig ANP32 gene selected from the group consisting of SEQ ID NO: 33 and SEQ ID NO: 40, SEQ ID NO: 19 and SEQ ID NO: 26, SEQ ID NO: 44 and SEQ ID NO: 46, SEQ ID NO: 55 and SEQ ID NO: 58; and SEQ ID NO: 55 and SEQ ID NO: 59.

13. The pair of gRNAs according to claim 12, wherein the gRNAs comprise sequences consisting of SEQ ID NO: 26 and SEQ ID NO: 19 or SEQ ID NO: 55 and SEQ ID NO: 59.

14. A method of making a pig that is resistant to an influenza virus comprising:
introducing into a pig MII oocyte or zygote a CAS9 protein or a polynucleotide encoding a CAS9 protein and a pair of gRNAs that introduce a premature stop codon into an endogenous ANP32 gene, wherein the premature stop codon is introduced into the endogenous ANP32 gene of the oocyte or zygote;
implanting an embryo obtained from the oocyte or zygote into a recipient female such that a pig is obtained from the implanted embryo, wherein the pig obtained is heterozygous for the ANP32 gene comprising the premature stop codon;
breeding the heterozygous pig to a pig of opposite sex that also comprises the premature stop codon in the ANP32 gene;
selecting offspring from the breeding that are homozygous for the premature stop codon in the ANP32 gene, wherein these homozygous offspring are resistant to influenza.

15. The method of claim 14, wherein the pair of gRNAs comprise sequences consisting of SEQ ID NO: 26 and SEQ ID NO: 19 or SEQ ID NO: 55 and SEQ ID NO: 59.

16. The method of claim 14, wherein the CAS9 protein and the gRNAs are introduced as a pre-formed ribonucleoprotein (RNP) complex.

17. The method of claim 14, wherein the sequence comprising the premature stop codon comprises the nucleic acid sequence consisting of SEQ ID NO: 7577 or SEQ ID NO: 7578.

18-22. (canceled)

23. The pig according to claim 1, wherein the gene edited ANP32 gene encodes an ANP32 protein that does not interact with a Type A influenza virus.

The application's sequence listing, which the Patent Office published only in electronic form, follows.

SEQUENCE LISTING (7578 sequences)

SEQ ID NO: 1 - DNA, 39564 bp, Sus scrofa
aaattgtataaaaagatttattgaaatttatcaatgacaaacagacataaaactcaaagtttggctcttctgagggggaggaaaactggtgcagatgtcttttatacagatgaaacacgggctagggaaatcgcacgtcacttcaaaagcaatccagaagagggacaggaaagcaaacctgtacattcactaggaatttgcagtcatttcaggtttccactaggtaagaaaatacaattttgcgttagtttttccgtgctcaggtgtatgaaaaaaaaaagaaaaaaacaaaaacgaaacccagctgacatgcagcagcgtctcctgtgcttaggtttgtaaaaatggtctaagcacaggaggacacgtacaagaattctcttgtcattttgtaaaacaaagcgttctactattttacagaacaagatataggacagctttttaaaaaatatcagaggttgaagtttgagggtttgcttcttctcatttgattctaattaccaaatccattttactcctaactcagaagcctgctgtcctcagctctctggctcatcaactcaagagtgacatcagggtcttcttcggagagcgaagcccaccaccatctgcaaagagggaaaggggatgggagacgggaagggtcccccgaccggtgccaaaatacgccttcaggttgctatttacaaaccagggcgctgactgcttctagcaagtccaagaaattcagaaatcatgggaaccagaacaagaggtaagatgcggctggtgctcagcccctcctgggctttgagaaaccaaactgaggccagccatggccttccaactcaagagactcagaaataccaagaaaggtaagagatctccaaccatcctctctgagggcacagaacaaacgctcacttgtgggtactcagctatcgcatttacagggacaaaaccagacacaaagaaaaagtaggggaaaaaaaataaagagtggcagtaaaaatagtattttattccaccccctcccaccctccctccccccacaacccccagtacacgtttcccctctcgttcccacagcaacgttacaatcagaaaaaaataagtttcagggggcaggatttgggggggtaagggtaaaaacagtcaaatcacaataggaatttttcaaaataggttattccacttagtcatcatcttctccctcgtcttcaggttctcgttttcgcttctgacccctttcttcttctggaaaagtaaggagaaaaggcatttggattaaacatagatcttgcccctggctcaacccacccgctgggaaagcaggggatcatatatctgggatgctctctctccctagcaaagcgagatgggggctctgcaaagcaagggaagccccattctgcccagtgccatgtcttcaggacccatgtgatctcctatcaacggaaggggccagcctctaccagcagagagtaaaaaggctgccataccaccaggctcctcttcatcttcttcatcgtctacttccccatcgttataaccttcctcatcctcctaggagagaagatgaacactgaatattaaggatgccccggtctcaggacatgccaagggaagccactctccctgacactgagcccaaaaagctgagggctgcccccagcctctcagagcccctaggacctgctcaacgcaggtgactccacagtgcagaggttcttttgcattgaggattccctttaggaatctgcagaaagccttgaattctttcctagaaagtacccacatctcacacagtatctgcaaatgatgtcaggggctggtggattctacctccagggataagaatttctgacctgggcatcactataactcaggtgctctccagtgtgagctcctggagcacaagctccatgtgaagtaggctgtcttgtcctcaggctttagtctggttttggcttcagaggaagacctcagttttaaaaatccaacttctgtgggtgaatccagcctcatcctacccagcccctcaccatcttgcaaacttggatcacttggaggagaggaaaaattcaaccccctcctccattattcccagctccttgggattcacgaacgggtgtgaattcacctaacacaggaccatgctttgtgctgcttcttaaggtccaggctagttgaaactctgcatgttgaatgctgttcctaaagcatcagacagcccattgtttaaaaagaacttggcaatagacttctttttgtcaagggaaatatccttttataatgtcaccaaatagttccttaaccagtctgtttgctaagactgtgtgtgtatagctctcctttactggaaaagctagacatctgcagatggccaatgagattacaaaaaaaaaaaacaaaaaaaaaaaccaaaacaaacaacctaaccccaaaacaaaatgctggcagctcttgtgacaggaagagcaagatgaagaatccattagtcaacacaacttattgccctatcttaggggggcctgttttgctaagtctttatttttaaaatacactatgatcttcagaggtgagcctagcacccacacctggggagcagagacacctagcagtggaaggcggcaggagccaagtctatcttagcagctttcccactgacttctgctctgcctctccccagtctgtgtgcggctggctgagaggtcctgcctgagcagatctgtgtggaagacaggtgtctccctccttgatggaggcagacaagaagcagggggagaaggcaggtaccttgtccacactgacatttaaaccctctcagtctaacttttgcaaatagtaagagttgatttagaaatctgaaaagtcagggaaaatgactctactacagagtccaagactctcatccaacacatccaaacacaaaacccagcacagagagccaggacctcagagaagaatgtaaaagtctcaaatagtgtaagtgctcaaagactcccttgtcaggccctgtccttaagcattttacttacaaattagtttatcctctttacagtccagtgagctgatccctattacaagctagctgtaaaaagacgcctattgtacaaatgaagaaacaggcccagaaggtcaaggaacttgtccaaggacacacaggtagcgagtcatagagctgggatccacccctcacagacacatcacagaccttgttaaaaaaaaaaatgccagctagtgtattaggataatggccctctacccactgtgtgcacagaaccctaatcacactcgggtgtgggatccagcagtatctgatcctatcacccatcagtttaaggcagtcttggcttttccgtagcgcactctaggtgctcagtgaatgtctaaattaacttaaaatgcaaaaagctggaaaatgcagacatggattctgcaagaactaattttcacatggaaatgagggccaggctcgccctggcagatgaatccgctccttacctgcccctggaatcccctccctcctctttttccaaggctggctacaagccttctctccccgacgccgcccagtcacaagccctgaaatggactcgaatcccaattagggctcctggctgcccaggctgatcactggggtatctggtgggactgacttccctggcaaagcaagggaaggggggactctgggagatggtcccccggcccagactcttacctcttcctctccactcacatcctcctcttcaccttcctcctcctcctcctcatcctcctcgtcttccactacctgagcatcttcatcatactcttcctctgtgcaacggaaatggggacaagaatgaaccggtggtgatctggcccctccctcacacagcacaggccccacgctgatggggctggcatgggaggtggtcttcgtgaggggcccatgactctcccccagcctggatgcatgaatatgattgaaggcatcctaaagtgatgccaaaggcaaacccttctctcaagttttatgaggacaaaaggtccctcatggaagctgagacagcaaagacaatgccagaccagagagcctagttacagggcttgagaaaaaggagaagtcagtatattcaaagagcatctagccaagctccctgctctaaagatgagaaagctgagtcccagaggggagaagcgacttgttcaaggtcacacatgcaattagctacagagctgggcctagaatcagaagatagaacaaactaaggcaaacagggtgtctgaatactttgccaaatactctcacctaacaagggaaaacaaactcatgtctgaattattcgggcaatgtctcagtcttcaactttactctggctgaaagacctacagggtggcctcactgagctggtggcgtgggatggggacaggaggtgctccttcctcttgttcctgactgctcgctgcactgcctggaagcccaacaagctgcctgcagcctccaccgcttctcaggcccccagggctcctgaattcaacaccccccccaagtcctgtcctgtgggcagcagccaccagagggccccacaacctctccagccatgacctggtctccactggaccctggatgggaaaggggaccctcaggccacaagccaccttcctccttctgttcatcccctccctggaagaatatctgaatcccgtgtcacactatagagagatgctataggatctcattgttgactttggaaaagggaaaaaaacagaagggaggactcagatggtttttaaggagttacttgtggttggagaatctttgggatgtttctctgggacttaggtcttgttattttagggcagtggatcaatgagacagggacagtaatatacaaagcagacagcccacttccctccacagctctagaatagagaggtcaacagccaacaagccctcaggggcccagcccaccccctccagagcctggcctggcctctccctggtgctacccaccatcctcatcctcctcgtcgtcgtccaggccctccacgtagccctcagcgtctgagtcagaggcctccttgtcgtcccggtcgtagccatcgagatacgtgagctgtggaaggagcttgaacacgttttctcggtagtcattcaggttggtcacctcgcaattgaaaaggtctaagctcttgaggttttctaactttttctgcaagcaaacagagtggacagtggcagggggatcagttgggggtgacacgagaggtgtgcagagcttcccgcccgcaggtgacaagcaaactctggctttgctcagccatgagacccctggtttgcggcggaggggggggggttcatgttccttatctggaagatggggggttggacttaaggatctgcaagacctcgttcttttgtttggcaatgacagcttttgccgtaacagtggcgggcttgaaataaaccgggctctcttggtgccaaaagctttgctgcctgctcctgtgactaaggtgccagaggggaactgagaagggcacaggaacataactaactccttctgtgaataaaagtaataacggcaattaatatagcactttattaactcaatttatccttatagccccaataaggcagaaataattatcagttcatgttatagatgaggaagaagagagcagagaattgggattggatcaggcagcccaacctcagacctgtgcttttactcttccaacaccgactttcaaaaaggacaagaggaaatgaagtcttcagattttgtcagtagttcttaacatgatttgctttgtgcaaagctttttaccgattagtttcagcccatactacaccttacacctgtttggtggctggaatctgaggcctaggaagtgaaagggtcacacagctaacaaggaacagctacatcttgattcccctcaagacacaggtaccctgccccaggccaagtccctgttccaacggggccaggcctgactggtgattaaagttactgtctcttatggtcagtgtcaggaactaggttgctctcttaagagtctgtgactgagacctggtcaagggcaggtaaagtctgagtttggaagagaaatgtctgcttccggttctgccatgctggcccatgaacctgaaccctgagcttctgtggagggcaaggaatgctttttgcacaaaaaccctgagagatgccccaactgccaccctatctacccagaaaagaaaaacatggccaacttggccaaatatcctcatggcctttccctgattctaaggtgcatggcttatgaacaaattcatatttacaatgtgttaatgtaatgcagtagtacttctatatttcaaaaaagctatcattaatcaatgacacaccttacagttgatttccttgaactcaaaagaatacattcactcagaccaggataatggagaaattgctattctgaccatgacctacccctttctggctagtgaatcataaagtttagggtatgctcagctgtatgtgaacgagcagaagaagaaaccgcccagggctctgaggccctggtcaccatcacactcaggactgatgacccggagccactctgctctgtgctcacagaggaaagcctacatgggactcccatgccacacagctctctgtcatcccaggggcctgtgtcaggaccacctgccacaatctagaggcagtagcctctggctagtgacccatggagaaaacaggtcgccacctccagggtaagcttaattcctgggtggttcccccctccccagtgaagggcacaagccgtgctctaagcctgaagaaatgacagctcgggtttccaaggctgggcagaaacgctcaagaggaaaagtgctggactggaagccgagacctgggacttagggtttccttcaccctgatgcctgttctgaccgtttgaccttggtcaagctctttaacgtctctaggcctcagcttcttcatggacaaagcagaagtaggagctccaactccatctcacagcatataatgacagtcaaataaagtgagataagccatcccctcccacccgccagcatgttatacaaatcaaaggcagcattccccaacatcaatccctcccaccccagtacagaggagagaaccccagtgactcaccagtggctctactgtgctgaggtctttaattttgttgccacttaaatttagatgtgtgaggttcggacacttttctgccaatacttccaggccccctgagattctgttatcacttagttcaagctaaacggggcagggagagaaaaagcaaaaagagctcttacaataacgaaggccctgggctcaagggcctggctcccgcacacaggctcggggaactggcaggcctcccgggcatagcccctcctgcgctctatttaccttcttaagtttgtttaactttggtaagtttgcgactgaggtgaggcctacattgattgtactcaagaactccagttcttcaaattcatctgtgaggccttcaatcttgccttcatttgaccgacaattgtccaggacgagctctttcacctggaaagacaaggccggcgtgaatggggtgaggaatggggcccaagaccggggaggggacaggaggcagaccagaaggcacctctagagcatggcagagccagagcccaccccaggctttctgcctgtagcaacactgtggggaggggggtccctggcgtgagcagagctgcaaaccaggaggtccccccactcccccgccaggagcctgactggactggagaaagcaaactcgataaacccaactgctgtcggcaagacccaactgccacattcttccaaattccattgaacaataaaacccccagctccccaccatgccagacatcacgttgttaggcaacctctgggccctgtcattctgtcagagcctctcatctcagtgccccgtgtggcctcggcctggccatgttcctgaagccagggacctacttcttcccatcctcagcccccactgccctttcacctgtgtgtctgtgaccttctgcggtcagatgggtcccgagacccacccgcatgcttgctcttacctgcccctgccatcaggcattcatcacctggtcactgtactggcctgccccagagcaagggcagcggaccagggaccctctctgactcactgttctctagaccagcactgcccagtagaacttcctgtccaagggaggagtgactagccacatgcagtcactgaggtgagactgaggagctaagttttacactgtatttatttaatgtaagtgtaaagagacacatacaagctaccatatggaataatatcccagcactagactttctctgcagagtcctaagagtagaggtggaaggagaatgaacgtccacaaacccaggatggccccgcagagaaatgctcaggtcggcaaagtccaaaagttggtctttggaggcacttctgtggccacgcgtgccatgaccccactcccacccccgccaccaccctggaggtgattttgccctgttaagagttcttagattcccctcttctcatcttacctacaatctgggccctacctcctttatttcgaatgaggtagaaagaactgataaagagctaccgtctcattcgctgttaaaaggcagacctggctgaaggcatgtcctggctccagcacaggtggtgtggagatggctgaggaagagtcatcaggtctcaggcctgaaatgacccaggggagtcagcaagggaggccagggtgcccgcttctccaggtggatgaccagagttttccactcctgttccaagctgatcgggggctgctccctgggcttccagggcctgcagggaccttaaaggtgatccctcctggtggcacctggtgctcgacatagtatccccacctgcctgctccttgcagcctctaggaaacatgtactgatgcccacatacccaccggtttgcatttctcacccctggtcacatggcacaggcctgtccttctcaatagcattgtcattcctgcccctcatagccttttctcctcacggataagtagacaggcctattctaaccagtccctgtctggggctgctccctgcctctgagcaggctggtctgaccagcttcttcctgaagggctcaggaagactgtctgccaagatgccctcctccttgggcatcacgggaccatgggccaacttggggaacagaatccacagcaggcctgccatgccctcctcagtctacccttaccagtgaccagaccagggaacatcagggcgcatctggccacagggccccacagctgccctgctttcttccctggtggaggggtaacccgctcagcctgggacagcagcaatctgccaggaagctagcaagctcttggcctaggcactggtgccagggccaccttccccttggatctggaatggggtagttatgtcctttcccaccctctcagtccccaggagaggccagatgtccaggtcaggccaccttctcaaggtcactggcaagagtgcctgggaataaatcctgtgaggcctttgccctagggcaggaaatcagtgtagagccaggaagccaggccttaggggagcagagcaagtggagagagatcaactgtactaaggagggggagccaccccctctgtgcgcagtcactgctggagtcacgcgccctaggcgtcttcagtcactcctttccttggaaggccctgggaattctttaagcttcataaaagaaaaatatgagaagggtttccagtccaccctcaaagatttcagacatgtggtttttccagacgggtcaagagcttctctatggccatcagccaaggagaaggcctcaggaacaaggaaaggtggtgctgcggagtcaagggaattcctcccggatgtcggcctctttcctgaagaggcatgctgctgcctgagaatcctatagacagacacaggttccagtcccagctcccagcaccaagcccaaagtggtggccactcccctcggggacaacatgcaagccaccattactgtttatagtaacagctaccacaggatctttcctgggccctcagcaggcaccctcttcacaggcactatctcatccaatcctcacgactgctccatggggtattatggggtgttctcccattttatagccacattgggctcagtgttcctaaagtcccaggaatgggcataggagggtgtgttcagactcccggcggcagtaagtgttgcaggataaggaggggttcctcattgtttccagacccccccaattcaatccaacaagctgccctgactgtacctacacatccttcagcccctcttctaactgttccactagccaagtgggggccactcccagccatccccaccctggttacacttcctcagtaaccaaagcacaaaaccagctcagcccaagctctgatgacgctgctgagagggagggcagttctggagaggggccagggggcctgagaccctgcctgctcctccccaaggagcaagaggccacctctcatcacttgggagggaaagcctttggtgtctgaaaagccgggtggctctcccaggtctgtggggcctccaggatgaccacgctttctgcacttccttcctggcagggttttggcgcagtttgggaagagatcaaggaggggagagatgggctgaggcttacaccccaacgatgctgatatcaccagaaagcccacaccacatcggaggaaacccactgctgctttttggggtgatgtgtcacattggagatggcaggtaagcagcctgtgaagcgtctgtaatggatcaaatagaagaaaaaaaaaaaaaaaaaaaaaactccagtgcaacagctgacctgtggaagtctgctgtccaccccctgctccacctgcctccacacagggccatgctctcttacagctcccaagccaggctcatgtgtttcaaaacatccaaccaccccaatcttccttaaattgactctgaaatcctgctgcaattccaacccacttcctcccctctctgctcggtgctgccgccccaaactcttccatgtgaagagaacatcccttttacatccagggtgtgttctgcttaaaaaagaaaaaaaagaaaaaaagaaaagtaaggcccattccccgctgccaaaccctgggtgtgagctaagtgcaaagttaaaattaaactgaaaatttgtactttgggttttagactctctcccaattccactggccgtttaaaaatatccaaacgcggttactctctctctagtccgacaactggagttcttctgcctctgtcgggagcttttcaaacacctcaacaacaaacctacacaggaccctatgcttcatttctcaagtgtggacacctgagaggtgcctgcatcttcgtactcagcccccaagagatcagactgcctggctctggcatttcctgcaaaacgtgtccccaaagcaaggacacagcagccatttctcatcaaggggagctgaactgtccgtgataaacaccaacacactatcctctaaggaacaacccgtcgcttgtttcaaaactgggaaatctcgtctttactgatctctcaaatttgaccattcctctctgctgccggcactgcagtcttggtcatggtcatctaagacaccctaggtctgcctctgcttccaaatggggtctccatgacagagggaacaggccttgacctggaggccaaggcctggctggctgaatgaccctgactctctccccgaggtctcaggatctgcctcacagaaaggggacgatggtatctgtgtaacctataaagtgcaaactctggcctagaaaacattcctggcttcctgttgcctccgggggggaaaaaaatcatcaaggtcccaaacggacctaaggaggtctttcactcttgaccacctgccctcatgtccaccaatctcttcacaccccacctctcacccctgcctttagctctagttaagccccctccccagaaagccttctgcagccagctctgcgcatcccggggcaccaagggcagctgctgcatgaatcatttaatcatgtattaagcatccgatcctcctagaggtcagggactgtccttctctgtaatcagcctagcggggagtggacacccatcaactccttaacaaatgtcctctttattgtgccagccacaacattaggtgcccagcatacagagggagacaaaccaccagtgaaactttcagtgcaactggtccaaaacaggttgaacaagccctcccttttttacaaacaaaaacaactactacttctggtgtgttctgtgtccctgagacaagcataatcccataaggaggcaggtcagcagtgcgtcctcctcttgacctgacccagtgctctctgcacacaggtctcgtgtgtgagaaacccctctcttcacacagtgagctcctgtgacactgtccatctgagcagctgaggggagacacagaggtgacggtgagccacagttggggtccttgccagcaagtggggtggtggcaggcaagaaagagacagacagctggtaaacaactacagtccagtgtgccagatagcaggcccaaggctggggtggggggtgtgcttcacatgcctctacctggggaggatgggaacgttccgggcagataggagggccccagaaagaccaagaaaaggggtgccttacagcaaagccagagttggacaggtaacttgcagggcccagtgcaaaatgcaaatgtgagaccacctgctcaaggacgataaagaattccaagacagggacagtagcatgttaaacccaagagcagggagggacccgctaggtgtgggcctgtgtgactgcacaggtcacatgcccgtgacgctagccccgatttaaatggacagcatgggcctaaagcagagccctcggaagaccagcaccagagagaaggaaactgaagagaagactgctttttatttttccagcacttgctgaggcaaggtggagaggtggacagaaggcaggctctggagtcagacagatctggctcaagcccaaattccccactgcaagctcatctcacctctgaagcttccgcttcctccaatgaccatagtgcccatcacctggggttggattaaattaaacagtgcacttagagcacccccaccttggaaaaagccacctgccttctcaatgcacagccaccttcactgctgcgtctgcagtcaaggcacaagaatgggaaccaaggcaggcccacagctctgagtcacctccgctgtctgcagagcttcttcatggaatgaaggcctctccacattctggagagtgaagatggtgtgcccagaatgcaccctgctggactttacacccacacctccttttgtgtagttttttccactaaacttgaggcttgatcttttctttcactgaacaagaatgcaataaatatttgtaactttggtttcaaccttgtcagtccccgaccaatttagctttcaggtcccagcttcgcaaaagaagacaacttaaatcagattgaccccgtgttttttcagtgctcatgggttttaaataggtcagtttttaaatgggccatcccctgttgcagatcccatttctagcttgaaggccaaactgtctgagacaccaatgcagggggagatgggcttcctcccaggtgttcgataggagggatagatgcttgtggttttgtagttttaaccatacaatctctagttttgcttaggagtcagtgtggcaaaactgaaaaatcctgtcaggttccatagggaacaagtctgggagaaaatctggacattatgaaagctagaaaggccttcgggatcatctaggtcagtggctctctgaccatagcccacagtcaaaaaaataaatacatttacaccttggctcagtaagcacatttttgcatgtaaacaggcatacacactgaaacaaaacttagccctgttacaattacttttttctattacattaaaaaagatgattttttaacaagtgtgacccacagtgtgcaaattgctggtctagttcagctctcttttgctagaggaagaaacaaggtccagagttggcctagagcccaggaaccccgagataggtgattctctgctacaccacactgcacagcaccacaccactgctctaatcagaaatcacagtccccggtggaggaccacagaatcaaccacacagctttttcgtttctgctaacaggaggttattctgcaacctcagtggagctaagactcaggtctccatacctattagagatcttttgaaatcttaactacggggcagggtcccaccttactttaaccctgctccccaaaaaaaatctccaagaaaaaagcatctggatctctggattttgtttgtttcccacaatagagctatgaaggcacgggtgggagcacatggccgcgggaagtcggtgacgccatccttattattttagggaaccgtggagggcaggccgaggctcgctgcagcggtaattaagctgtcggcagggcccgggtaataggctaagcgccggctgggggagggcccgtattaacataaaccctgtgactggctccctcgctgcctggaaccggcttcctacctcctcccccaagcttgaggaggacttggtttctgcctcaccaagacagaggagctggttccactgcagatgcttcatctggccagtagaacagactcagtaactcaagaactggtgcaattgctgtcggacctgggctttgggcttgtcagatgggcctgtttagccagtgagcctggcagagcttgggcccctccctcatgtcatgcctttgctctcctcccctcaaacctcgttcctctcttccagccagtctagattctattctacttcagacacttggcagttccacctccaggaagccttccctgattgcccagctcctgccctagccctgcctgatttaagagcaggtaaaagattcccagagcagcagagaataggcccagaaggctgtctgggggaaaggaagtgcaacggggacaggaagagatgagggttctggaactggtgcatgaatgacatgatcaagtgaagcaggctgcttctaagtggctgtcctgtgctaccttcagcaggtaatggaaggcgtgaagaagcaggaggtggaagcagagtccagtgaaggcacagttaccagcaggtggtgtctgaacggtggccggggaaagggggacaagaaacatggaggtgtggtgcaaaggatgctcatcaggcagtctaacgacctggactctgggccccactttgccactgacttgcagtgtgccctgggggaagtaacatccactctctgggcttctgcagtcctctaatccacacactaaacaatggagcacagacacgagatcccttttagttccaaaattcactgggcccatccacttttagtcccgtcccacatccaaactcagttatgttcctcaacagaaggtgggggacttcagaggccagaggagcccaggagtcatggttgaaggatgctagaaaggaaatctaggacgctgggcaattatcccggataattaccgaaatgcgaaagtcaatcatgtagtctcttaaaacacaccaggatcataaaaacagccccctgtgctcaaggtgctggtttcaaatatgggcatctggccttgccccatgtgatgcctatcaccctacaggacagcagggagtaggcacgtggactcatggggtcctaatgactgctctatgatcctgtggttcataaaaagacccacaccacccacgatgatctaggagccaccgcattggccccacacaacagaagagccccaaggagcttgatgaggaaggcccagagagcggagagggtacatcctgggccaccttcctaaaacactgcttcgatcacatcacatcatgtctagtcgctctctgtccaaaagcctttaaacggcatggggatcaggcgccaaatccagaggaggactcccagccccctgaccatcaatgccccctgactaaatccccatgtctcttttcaagcctgttcctgcaccacccctttgcccgtgactggcagcacacacttcacaccacctggcatttcctccctgtgttaatcgtttatgaagtgcttccccaggcctcacttccttgaacccaaagccaagtggaattccactcctcccatccctccccagggaacacaccctgtcccccaccagggcacccagagagctgctgcttggccacaagacacctgtcagtctttcctcacagtctctcccccagacacggccttggtaaggtctgagatcttggtatccccttctggtgccctgcccagaggggctggctaagtggtcaaactgaaccagctcactcaccctagaagaaaggatggagttggggagagcaatggctctgaccccttattcatttttgaagcaaagcaccccaactctactcttgggaaaatacacaaaaagatgcgaaaatggcttcctggccctctgtctcagctgcctgatttttggctgattttgactcctgaaattaatttcagggatttaagcccagctgggctgggaccacttgtggaaatcctaccggagtcgagtcagcaaggtgtgaaaaggggacatagctcagagtttctgtggtgggtctggtgtggatggagacagccatccactccccatggaccaagtggaagaatggtttgcacaacaaaagttaattaatttccgtggcatcaccatgtagcgatcatgagccagcagatcacagccccttcccagcctagcaacatagcccatttaaaaagacaccaggccattcagattcaggacaggacacttctggcaggctagtacgggcctctgccgaatttccagctggctatagaaatgtgcttcagaaactaaaggacaccatcatcgccacctctggggaaccactggattcaatccagctcctcacccaaggtcacacagtttagcccaatgtagaacctaacctggggccagtcttaatcctcctaacttggggtctacaccccagcatgacaggcctctccacggtgaactccttgaagcaagaggaaacaaaagaggaaaaagaacacagctgttaggaaaagagccccgggcctgaccccagccctcccgccttcctgcctgcctccccacactgcccaggagggctgggagggcagaagaggcggggaaaggctaagtggctcagagaagaaaccctcgaccttggcctccttccctgccacctctaccaaaatgacagcagcattggcaatgacagaagcagagcaaacaccgcggtgctgaggcccttgtgtccaaccaccaactggaaaccgctgatttgggcagaaatgtgaaccaatcatgcaaaagaacctaaggctgagggctgtaagttttttttctctatccaagaccacaaaacaaattagccaagggtcacacataagaagcaatttcatctctttctgccttagagaaatgtgatgtgcagcttgccatagtctggaaatgaaggtaaaagtactggggatggaagtgcaggaaatgctaaggagtaatgttaattccatacactactaactggaagggagaaacggggcaatggaatgagagccaggaaggaaggaggggagagggacggaacaccgagggagagtaagctacagaaagactctgtgaaaaggacacaggcatcaaaaagagggcagaagcaagaaagttagaggctcagtgggtttttctgtacttccagagttggtgagagaactttacctatatttactggtttgtgaaatcgagcacgggttgcattctttgctgttcacagatctacagctgctttaatctcaagatgctaaaaacaaagacaaaacaaaacccccaaacctttacgattcttgctgagtcagggaggggctagacgaatagacataatgtaaaaaaagagcctagagattttagttagccttcatcaaaagctcatgaaggagatccctgccaagatggccaacacaggctgtgtggacagaaacaagtgagatggaccaagcgtcctcggtcagggtcccaaaacactgttctgatgggtccagaccttaaattctgacacccgaagcagaacaaacttgaggcaggcaccaagggtaggaaggcatctgcaaaccgtaacactggaagaacaatggaaggaactagtgatgtttaggctggagggtgggggaactcatgatagctatctttctccgactattggaaggagagctgtatgcaaacagagtacatttattctgtgttctccagcagctcaagagctaaggtcagtgtgcaggaattacaaataggcagtttttggaccaacataaaacataagagggtgttcaaatctttgcagcttgtcccaccaaagaatgggctgctctgacaaatcagtgagcccctgtccctgtaagtgtatgcatcagaggctgctcagtgacttctgcaaagaactttccacatgaacagtactgaacaattattaaatgaattaataatattgtatgatgaagccctgcaaagagatgagccttggatctttcctcctcttaaaatgctatgatttgatgctttccctctttaaagaagcattatgtgtttaggccacaggcctgatttattcattcaacaatgtttacagagtatctgtcaaaagctgggcacctgtgctaggaaacagaaacagcaatgaacaaaaacaggcacctaacccgtgggtttacaatctagtggggaagagataataagccagtaagtatagatatctatgtacgatacatataaatgcaacaaagggacagaggggaaaaaatgaaatcgtgacaaaagacagtacttcacaaaagatcctggggaaggcctttctaagctgagctttcagtgaggacttgaagccaagtgaagagggcagagggaacaccgagggcaaagaccctgagcaggcagcatgcttggtccttttggggatcagccaggacgatgggtactggtgacggaatttgtggaagggaaggaaacagagtgataatgtgagaatgagatggggagaagcccactgtctgtcacacgcacttgtacacacctatgggatgttctagaatcatgtacctggtgccagagtgatgggcttcacaagcagtggaagtcagaactgtttggaccacagcaaaggggttcagatccaagacccaggcataagcctgtgatttctcttgcccttccttaaaggaaaaaaggagctttattcaggactgtgctcacccaatgtttccaggtagaaacaggccttgcctgcacccctggggaatatcctttggcagaaagttttactcatgggtgtctgggcacacgagacaccatcagaaagtgtggtttggttccaggtttttttgtgtgtgtctttttttgtcggttccaggttttaacacttaggaactgcagctttgggcaaagcttcactgagacttactttcctcatctgtaaaatggggagaaggattcctaccaatcccacaaaactctgcgggactagaggcaaaccgtgctgtcctggagggcacagggaggaattttacgaacaagtttcttacccgaaacttggcgccccagagagcagaggaggtgttatgtagctcagagtcccccacactgccttgcacttagttcgcagtaaatgtttgctgaactgaaaagcattaaaaataacctgggaaaacattctgccatttctttcttcccattaaactgcagcacactttgccagaatgctccagaacagtctctgtaatccttcactttaggggaagaaccacctgagtcacatcagggcagggtgttcagaggataaagtcccaggcctggagacaggaacaaggcctgacacctctgcagaaggcctctggctctctgggtcaccccagtctttctcaaacactctgagctgatgattcaggtgcaggccaccaatggaagaagggactacagaccatcctaggacaggggcagcagcttccggaagagctcatgaaagccagagagacacaatatacacaatagatacacaacatgccactccagatgaaggcctgatctaatccactgaagcccagatacagagaatagctagtccaaggtcacctccattatttttatctttttaactttttgaataagcaatacagtcattctcatggtttcaaaaccaaaaaacttaagaaaacatacagttaattctctctcccaccctatccagttaactatcccacccattaaaaatcctcccagagtttgtttacacatacacaagcaaatttagaatcttattttctcttttatcccaaattagtatattatatattgttctttaccttttttttcatgaagtttgtgtaatatatagtacataaaaaccttccttgtttctaatttgcactgtttcatggtgtacatgcaccaccatttttcttaactagcccctgattgatgagtatttgggttatttccagtcttctgctataacaatgctgcaatgtccataagccagcacatatgccattttgcattcaaccaaagagctagaatcagaccccacttctgacctgctgggcaacagtcatagagacctggagttccacaatctaatgtgctcaccactatacctatgtggacaagttaactcacctccgtccattcaatgctatgacttagaacctatgaatgccaggcactgcgccaggctccaacaataaaggtatccttgccttcagcccccaaagtgtccagtctgggatggacaagcagaagggactgctacagcacacaggggcaagttcagtgtgtcctgaaggccatctgacctctgtggacctgtgtctctatctggtaacggagtggtcacacctgtatcctaggggcattctaaaggattcaaatgtgatgcttgccaaaaacctagcatgaagcaaggcttggagcaggtgctcaacaaagggcaagaaacacggcactgccatgcccattcacaacacttccccttgggaaaggtggaatgcattgttagtttttgaagtagcacctaagccccaagttgtcttaggcaacttttattggaggacgatttggacttcctcccactttccagaccctctttcacactttgaggtatcctaagtactttctcattggcatgcacaagccctcatgtttgaagtatattagagctgtcagtggaaacccagacacacatatattaagaccctggcacagaaaggtcaggacaggcatatggaaagttgattttgctgggatttccctgatagtgtaaaagaatcatttaaaggggaaaaaaaatctaaaggagaaaagtcactgaacctcacatttacaatgtattctatttcacaataaaacagttttaaaagtcacaagttctagtatcatctgtttcactttcttgggggaacaaatgcagcagattttaacagagaagagaaagaaatgaaagttaggagtctgaagttattatttccatattagcagcagccctaaagtggctgggaggaggtaagaggtcaaagttaaggtgtgaagccagtggcctggctttgtacccagcactgctccacagtactatatgaccttgagctagacacttcactagctttctgagcctcatctacgaaagtgggaataatcccattcattctgtagtctttctatacagattaagtaagaataaatatggtgtctggcacccagatactcaacagttaaaaacaaacaaagcacataaagatactattttctctcaatatttagcagaaagatgaaaatctagtgccttccctttataagctgaaagcacaacagtaagcatcaaattatccagcccccataatactgggaagccagattcctaacaggctgattaatgaagtcttacttcatcagaagctcctttcatattcatgcaagatgcctgcttttagatgaaaactctcagccaattaaggctcatcccggtccttgggagaggtgggtcatggctggatttgtgacctgactgtggatttctccccttaaaataagccctagggcctccaagcccggcctcaccacccttcatcagaggtttcagcaggatctcctttgctcacccaaagcatctggcccctcaaaccaggtgagagggcctgaaggatccaaatggaacccaaaaagtagcagtcaagaaactatttcagaaggacagatggaaatcccactgtgccaggcagcgagagcctgtggttacccaaactgggccacatctctgctgagacaggaacaaggccagttccaggtgctgagcccttgcctggggggatgactggcggttacagatgtgtttctgctccccactctcctcaacgtactcagccacaaatgagaaggtaaacctaccattgttaataaacacaatttggaagtacaaatctttaaaaagctaagtctcaagaggataataaaggacattctgggacgaaaaggcagagggtcagttggcctggggacacgcctaaggttgaaaacagggagtactggcccattacagtttgtcactcttttgtttcaggtcaactttccaattaatcagctcatgaattcaagtcttatcctttctgggcctcagcttgctcctcagcaagagagttcctaggtacctctacaggtcctggctcatgggtgccagaagtctagtgtaggttactcgagtctttgctcaaatgccacctcctcagagaagccttcctggaccacctagtcccttttaacacagctttatgtttcatgagacctatcacaccagcagtcatgcctttgattgacttattaatggtttcccttgatggaatggaagccccacaggggcagcccaaataatgaccttctcctgttcactgctatatccagaatgctcagaacacaactcaccacgtggcaggcattcaatcaacgtgtaaaaatgaatgatcctccgcagtattttctatctgcagaaatcaccctcctaactctggttaacctcaggccctagccagtcactgctgctcatcagggacatctgtggccattttaagactcctggggctagcaaggcatgcactcaatataagtctggttttgggcatagtggacacctcaaagcaggatccagacctccctggaatctaaggccatgcatcaacctcacaggtgcttttccattcccacatctgacccacatgggtggccacttctgacaatgaccacactggccactggaactagggaaagatacctgaacatctacaaaggccaagtatctgaaccaagtacccctcacttttgagaagccaacattccatttcttctcccatgcctactgctgtacctcaccccaaacagaggcctcagagggccctacactagaagcctccccagactcagaaaccatacctcagcgtaaaaaaacaccagctctctcatccaagacacacaaaggcttgtctgcaacagagccacaagctagatgggagctcagaggagaaccactcattatggcagcaggccaacctctgcagaggtttcttcaggcctcccagacagctggggagctttactccagtccacgcctgcccactctccctgggttgcacaggggtacgcctgagagcttccagaggggaggggaaacatgcagcaatggaaggaacgccccggtgactgtgatggccagttcctggccctccatatggaagcggcccctgtgccagaacagacagatccttcccactggccgccaggcgggaggctggaggccacatgacatcattacagagccttcctgatgcacccagctgcaggggagctgtcctgggctctgggaacactcagcgaggccctctggcgaggggattaaagagacactgaccaagccaagggaaagaggggccatgatgcacactccaaggaggtgaccccagtgtcaggagagagaacactactgtgtgacccggaagtcccaggatcttacatcttgacatcacctgggatggacataatttgttcccattattctagtgagtcaaggaagacttcctgggggaaacttctcaggagccatttggatgaaagacaaaggcttgagaggggcagacctagagttctgcagccaggagggagttgagaggcaagtggtactactggtacagagcaagacaggcagacagcccctaactcctgatgggcaggggtgctagagcaggggacctctgtgcttggctgatgttgctccagctccacctcaacaagaagcctggggcccttcttgccctcgcccacccacctgagcagctccaagtgagccctcctaagtactcccgccacacacaagctcagatagtgagcaagggccttcctcagtagggctgtctacaccattccaacagctcaatcaagcctaggctggtcagaatctactaagcttcaggggctgtccacagtccatacctgggataaaccttatttctctccatcctgacaacagcccctgggaaacaggtattagtgttagtcaccactttacaggtcaggcagctgaggttcaaaaaggtgacctgccagatatcctcaagtgatggggctcagggggtcctggcacagcccaatacccctgactgcatggcccttaggttccctcctttttacaaaatatccactagcctctcagttccctgaagaccaaggatggatcaaatccagccttactcaataaatcccgcttagcactcatgagataccagtaaacaaaaaatcacaaatgtgatgagcaggaatgcgggcacatgtgaaatctgtgtggccagggcagggcagggatgggcaggctaagaaccgggtcccagcaccccagcaggttaaatcctgcacctgctttcctctttgctgttttccttgctccattttcctctctcttacatccatttggtttacttcttcctacctgctgtgaagttctgcaccctgactcaatgtggcggcacccagccatgctttagagctcactttagagcattctaaaaagagactgggcaccaccttgggagactgacttggtggttgggtagagcctgggaatttcttaaaatgctcccctggtgggttctgatgcacagctggggttgaaatctgccttaccaaccacacacctttcctcctgcctaagtgccgtgttagctatacctccccaactctgctacagaaactggaaatgccagctttctgtaacccactccccccatatgcgtaccacctcccccagcccagagcacagataatgagattcaataaattctacctgctacacggatacttacagaacattcctaatgttgtgctcacaggtgaaagtgggctcccctcaccctcccaccacagccccagcacccggcctgttggtgaggcaatagctcaggggaaagttggttatgtagaatgagtctctcccccagcaatccactcccagctcactcactctctcactcatgcccttggcaaaaggtagcagaatccaccgatccagagcttctggccacttctgactgtagagactcagcacaactttctgaagtgcccccatagaaacaccggcgggcctgtcttctccaggtttccctgtggtgatcaactcctgcccttctagcctgcacagatcctgcctctgacagatttccagcctgcaggataataggagagcacctcctcccccttccctgactcgcccaagtccgcggcccatgggatcctctcacctgattacttctgggcctttccaagcatctgcaggagtagcccaggggctagccttactggatcttaagagacgacctgagggagcttgggtgtgtctgtgcacacagcctgaccaggcagcacccagctgacaggcagcagcggacacttgatttgctgggagtctcgggcagacccggattttccctgcttatcaaagaagggtgaggaatgcgctccactcctacccatcaacaccagggttgggaagatcttaataaggaaggagagcttgataaggcccaggcatttcttacatggcatgaactttcataaccaaattaaaaataacacaggcaattgactggaggagtgtggtctcccaagtggatggcccccagacaatagactggtgcaggaaaaaaatactcagacgtttaatattttttaacttatctttttaattttgttatgtttcacaatatgcatatttacatgaagtgtatgtgagtcacctgtaactaaaaggtagacatattagggctggggctcaggttcacatttttactgacatgggatataaaacccagaaaaatgtgaaaaccactgggctgagaaagtgtgaatcaggatgcgggagctcacaccgacccaagggaaagctgaggacaccaaacctcagtggatgctttgtttcagtggctttgtgcctggctcaccagaccatgggtgatgaaaatgacaagaacgtgcaaagaccatggctccttcactcaaccaatacttctacaatgcccgacacatgccaagtgcagtgctgagcccaaataggccccctcaatcatgcagcctatgggctacgtggggacagcaatgctatttccaacactcacatgcaggaatatctaattacaaactgaagctctttgaaggaaatgtctataagtgttttagaataaaaaaatgagacctagagctagaggaggggtggaggatgaaggagatggtaaagatgattagatgttaaggacatgatggtggcagttcaagcatagaatggattcgagagcatcaatgctggtgagtgaggccagtgcagtgggaagggggtgaggaaaaaaagaggcagtccatgaaaaatcctagttgttcttattaaggcttctggactttatcctaaggacaatggtgtattttaagcacaaagcgacacaattacactcacattgtggtaagatcattctggttgaagtctgaagcaaggcttcaagggggctgtgtgcagccctttggacatgccgactctggggacattagggttgagacaggtgcatcctgggcttagccaagaggtcaggctggaggtgtaaacatcagaccccaggcagcacatagcacctgcagctgtcagtgaggaagaagaagagtctgtagggagggaatacagaagagagcattcagagactgcgcttgaccgagtccaatacttcacagctgcaggagggagagcaaaaggaccccggaaactgaggagttgccaaggctgtaggagagctcaccagagaaagggagcagtactagggaacacacctcatgaaggtcaagggtaggaaggtcaagggctgctaaggagtcatgtaaaagacaataaaggctattgggatttggggagcagttcaggaattggactgaggaggctgaggtgtaagagaagtcagcaggaagttacagtcagacacttcaggaagtttgaacataaaaggaaaaagagaagttcccgttgtggcacagcagaaacaaatccaactagcatccatgaggatgtgggttcaatccctggcctcgttcagtcggtggggatctggtgttgccataagctgtggtgtaggccagcagctgcagttccaattagacccctagcctgggaacttcccttgctgcaggtgtggcactaaaaggcaagaacaatttaaaaaaataaaaataaaaataaaaaggaaagcaagagatacccagtagctaaagagacgatcaagagaatcttcctacttgctttaagatgggaaaaacatcccaagcttgagaaggacccaaaggagagcagctaggtgcccagaaggaaaaagataactgaagggcaaaagaggtaagactcaaaggacagctgagctgggcatgggttttgtccgggaatttcttaggaaaccaagagatgtccattttctctgtgaagggaaggttgctggctgggaaggaggggtggagggtggctgggcagtcaagaggagtagagactgaagaaatagtggctgaagtagtgacaatgcgctgcccaggaaaaggatgaattgtgatattaccctcagcagaaacgacttggaatctggtgctggggctgctccatgatgtttagatgctatagctacactcagatgccacccattcctgttgaattgcttgtggggaaaaaacaacctctgccatgtttgaaactctagcttctaacctctttttccattgaaacaaatgttactttttgatacaacgtgtctatccataacataagcttttttttttgttaaagtgaatgccaacaatggtgttctggcagaacataacaatgacatctaacatttattgagtgcttactgtgtgccagactgtgttataggcactattacatcatcattttacagcgccaatgagaaggagcacacccaggcagtccgaggaggccaaggccaaagacctccccctgcccaaccctctctttcccgcgttggaaaatgtcggggctcccagtgcagtgcactgagtgatgagggcagcagcgggtgacgagagtagagagggggtggaagaacatgcttggtagagggccactcgcacagcaaggaaacttggaggaatcactactgacccttggtggaacgatttcacaaaacagcaaatggcattccctcattccccgaaaacaaaccacaaaatatctgagtgtgggaatcttaatattcatcttttaatgtctttcaaacattaacaagtaatgaaatcgattcatgggtcaaagccagaacacttctgttaatgaaaagtgttttacccaaaataagggagcacattgtcagtttctgagataacctgtgtgtgtatgtttatacatactgggtagtcatgtaaaacatagatcttactataggaacgaaaagtttgaaagtcactgatctcattcaacgctctcattttagagtaaacagaggcccaaagaggccaaacaacatgtccaagtgtgttaatcacaaagctgagaacagcacccaagtgtctaatagctctctggtaatttcctcaccaaaccggaatctccaaatgtaaatccctatgggaaagacagcccaaactttaatccacattagagtaaatgatagtggggtaagtaaactgatcttttagatctgctgcctggagcaagttttggtaaaaaaggcactagatgagtgcaccagggcagctgcagagctgaaagaaaataaatttgagtggaaacacaggggatgcagggtgtggccctgtaggcactggatgggacctggtgcagggggacaaagacatcttatctcattaacaaatgttatcaggacaactggttctatgctgggagactgcagggctaggggtgctttgctcatcaccattttactaaatgagaagttctgaataacagatgccctcacaagtttccatccctgccagactccatctctttaatgaaaacatccttgttgggttatttatcatttgtcatataattatagttcaatgtaatataagattcagactcaggtccctatttctccaactgtctgtgggaggaaggtggtggtgaatgagattgatggaaggtacttcttaggagactagagcactagctagagcagagggtagacagggcaaaatgtgtgtccagggcaggagggcatggcatctgtaagggagtaccccctctggacaccagagtaatgagcctcctcttcaccaagttagatttcaggccaaacaactgggccaagctcattcgaccagagctcatgtccactcagcaacaagctttctgctcctttcctaagtgatacaccaaggtagagagggcaggcacactagtaaggagatatctgataagcatcctacacaaattccataaaggattaccaacagccctgagatttttatttcaatatggtataattaatacaaaacgaagttctggacaaccagcccccatagctcaatcaggtgcctctattacaaataaggaggcttgtttaagtctagagtaagtcatcttgagaggctggaggtgcagcagcagcccagagagggaactgggtctgtggtttgctgtaaagtacaggccacagttatggtgactgggcctgctccccttagatttattgcctccttcctggccaggccaatcgtacatctatttcttccactcattagctcaggcacaagagactagaagttgaaagaagggctctggaactcaaagccacattactcttggtacattccccaggcaatatgccctggtggaagaggagcaggcccaaactagagattccaggattatccgcaggttttcaatggtctgtgctctgagagtctgatgtcagtcaccaggtacacagctactgcaccttctggacctcaaagctcaaactgttgcagttcaaagtccttccctctagttttgaagacatctaaatcttaagggtaaccatttaactacaagatatacaaaagccttttgaaatattttgaatatgaaagataaaaaatttccattggttacagagaataacttctgaatagaaggaatgctcaattttacaccagcagtaagtactacttctcttcttatggatgttcatggattgaagccaatttccactacatatcaactagagaaagggcacatgtaaaaggccttggaaagaccccctttaagcaccaccaaaaagaaaggcttgtcacatgctttaaaaaattttaacaattaaaaaaaaaaatttagggagttcccatcatggctcagcaaaaatgaatatgactagtatccatgaggatgcagctttgatccctggccttgctcagtggcataaggatccagcattgctgtgagctgtggtgtaggttgcagacatggctcagacctggtgttgctgtggctgtggtgtaggctggcagctatagctctgattcgacccctagcctgggaatctccatatgcagagggtgcatccctaaaaagataaaaatataaaataaaaataaaaacccagatcccaaagtccttccccacaatctactaaaccagagattatcaaacttctgtaaagagccaaacagtaaactttacctagaggtaatattgacagtactacataggcactttttttattgtaagaaaacacatttctacaattattgataaaatacaaaatatataataagtacaatttttttggtaataaaggtctaaggagataagaattctttgcagggggaagggggataataacatttcacttaattgggattcaaagtgttccacatcatcaaattgattgcaatgtttacacgtactaattaattattcttagctcatgatacaaaaacaggcagctcacccaaaatttggcaatgccagtactaaaccaatgcctagcagtggagccaggaacctgcattctacatgcttcccaggtgattctggtaagaggccactgaggacccaatatagtctatccaattttcaaagtccctactgttttacaatgggggaacccaacagtgaagagtactggctgtctgaccttctctcccaacctggatgattcacccctgcaaccgagacgacatagccttgcctggcctacccttgaggagttgggggaggattaagtgagatgatccataaagtgttattggtaaactaggtcctagaaactaaggacatgccaattctgttcagcttttggtctgtagatggagactgatgaaagtggaaaacacattacatgcatgatcccatacacaccactgagtggctcctgcttatcttctcattactcaaaatgtgtcccccgacacctaaaaggccagattcatttcagcctaaccagatgtgttgtgctaacccaaagtaggaaagtgtaatatggcttcccccttaaaaccgcaatccacagagtctctgatcctgaccacctacctcagtatcttcaacccagaggctacccaggcttctctctcataaggtggctccattttaaagccaaagaaaaagctctttcccaccgtatattacaaataagggggcttcaggggaggcagtaaagagtgcaggttgagtatgcagactgcctgtgataacatctttatgcctcaatctcctatgtgtgatataaggataataggagtacctgcctcacagtgctgctgtggggaccaaattaattgatttgtgtaatccacttacaactgccccaggcatagcatgggtactatataagcaccagctattgttgtttttctctaaaccctagaaaagctcaaagttgtgcctcatcacactccaatatctctctgagaataacactatcacacactgagcacccgagggacagatcaggccggttttgtcactgactcattaaatgagattattagtcccattttacaagcgaggaaatcaaggatcaaagaggcaggttaacttatcttttgtggcaggaagcattcaaactcaggcctgcatggttccactacccagcttcactgtgaacccctcaggctcaacactaccatcaagaacgggaatccagtaacaaaacagtactgaccatgactatagggaactcatgctcaattttctgcccctggatccctggtaggcttgcataaactggagttaatatcaggctacttgaacccaattaggcagtaagtcagtctggaaaacatcatgcgatgtattccaaaggtcaaagttaaaccttactttctgggcagccttagtcgggcactgccttgaaagtctccatgcagacgtctagtagagtttaaccaatgaggtgcttaaccagcatccatatcaacttttaaaaagtcccagagagacttcagcgacgcgatgcccttcctggctctggagtcaagagccagagaaaggtggttggaaaaagacatttactttttaaaaggcaaaccttactccctattcttttccgtttagggttacttttactactgtagctgccttcccttgggcacaaataaaagggggaggagcagaaaaagagcaagggggcctcccctagcagccagcagggcgctgcaacacccacctgaaacgcggagcgcgacctaccttcccggagagcccagcccctgagggcgtttccccaacgcatcaactcgtccctcccgggtaaacggctgccttcttggcttcagtcagggccgctagagtcgcgtgcgcacccgcctcccccaaaagaaacctcttgtttaatttctccccccaccctcctatcacttccgccaaagagcaaacaccagggcgatccgttcgtctttagggccacatttaactacggctaaaacgcctgcaggaggaagggcgagatactggcgagaagaggggcgggggaggcagagaacgcgccggggggtggggggagcactcgcagggaggatcgtcaccctacggagccacggccgccgcggcgctccagcagagcctcaggcagttggcacagggaggggaccggcatgggggcccagagtacaactggggggggtggtccctgggaccggctccccctgctgtctccaggtccggggccgtcggggcgatggcgcaagagtctgcgtcccccccccaacagcgacaacagccacggtgacaaaatggcagcccggcgcccagcagtcgtgccacaggcgaccaggaccctggcggccgtccctgccccccccataacgcctcggcgccccttcggattcggcctcgggcggcttcggccgttaaaaaaacaacaataataaataaaacaccttgagctcaaaaccagctcggaaagccaaaaggcccgcccgggggccagcccggcgcggccgcgacccgacctgcgcgcacagggccaggccacccggtcgcctgccaaccagcccgcaccccgcgccacatggagcctggcgcccgcattcggagccccgcgctcggcgccggccgcgccatgggggaggggcggggcgggccgcgcgagacccgggaaacatggctgctcgtcctatttcggcgtcgcggcgtggccaccggccctcggatcagagttgggagaggctccgaaggtgggtgtgaggggacccgggggagagcacggcggggaggggcgcagggggagttctccgggagctatttatcttaagaacgtttaaaaagaccagtttctcctcccccaccccttttgtccctcattagctagctttctccccctcctccccaaacgggcagaaagtgccccctccaccctcacccgcgccccaccccgcctcaaggcagggggcaggcgtgtgggccgggaggctcggaggcgagggggcgaagcgtgagaaatcgctcccagttcggcgcggcgcgctcccctcccccagcacacactcggcgaagtttaaagagccggttcgacccgctttcgatctcgctcccagttggccagcagcggggatggggtaggccgggcgaaccgcgcctccacaccctcccgccgcgaccccgaccccctactcggcgcccttccccctccgcacggggggcttccggaaagtacgcgggaagcccgcggctcgggccccctcccccatcaccacacccagccccccagtcctccggctccgggtccaagctgggatgaaaccggccagagaaaggcaaaccgccggcaaattgttcgcggaaactcctgcgtcctcgggcgggcaacccctcccctccctccgccaccccctccccgccctgcgcgccataaggcactgcacgtcgacagtccacagctgcgttatgatgggggggcacaaaaaggatcttgttttcaaaagtctcactcaggtttgggggaggaactagagaaaagaggaagcaaggcctgcctccgccagggattcgggttttaacgggctgaagcggcgacaggtcagcgcacagtgctacccaaactcccaactctgtggaaccccggccacccgggctgggggtgcggggttcctccgcccgcgctccgcttgtcccgggaggtgccacgagggcagtcggccagcgtctccaccccagaccctgggtctcctccgctgagccgccaactcacataaaacactgaaagcgagagggagacagaaataaaaacgggtgttcgttcgagtaacccaccctcacctttcccctccttaggggtgggctttggccagagcctccgggttcccatccgtgtaagtttcctctggccgtactcgcgcctctgcccaatcaataacggcgacgggaaggcaaactcccatcccggagctgcgtgtctgttatgcccgcataaatctggacccagccaatacccaccacgggcaccagctctgggcagctcgcgtcctgacaaagtttcccgggcccatttattaacccgtcgccgaatggctgccaaggagcccaccctagagacaagacaggccaggggtcggtgccggggggcgccacggctcgaaggctggcaccttagggaggctggaaggagcaagggggagagggaggacctggacttagcctttgggtaacttgcagtagcgatcgcgcgaggtggggaggcgcggggattatctgtgcctttgcacgttcgaaaatccctccccccccttcttccaatttatcttcccttcagaaggaaaggaagaaacatcagcatctggcccgaaggtggggtggaaagagtgagggagaaagaggaggagaggaaaggaggcagagaaagggagggagggagagaaagggcgcgttcacgaacactacaaagttacaaatatggctcccccgtctctcgcctcatcactgcaaagaaatgaagacgcactttaaactcgagccattcccaactccgctgcagccccctccccatgcgctctccccaggggcctcggcccacatttatcagaaactaaaccggactcgcgaagcccaaaacttattgtgtgtgtgcgagcgagagagagagagagagagacggagagagagggagaaagggagggggaaggcgcgggaggggggaggaaggggggattcatttataaaatataaaaccccctttttttgttgttaaatccaggaggcagcccctctcctcctcctccctcgttaatctttcccctagacggagtcacgcgagcagcgagctcagagggttattctgcctcattctctccgacccaaacgcgtgcgcccgctggcccccgatgggtgcacactcgcacgcacactctcgcacccacactcgcacacgcgggagcacacgcacaggtagtcacacaccaagggcagcggcggcgacagccagaaaatgatcggatggcattgcaaccccccaaccttgcaattcatttgcagtccgacccccaaacccacatctcctaggcgccccccccaaaaaaagtgcctccccccaacgcacacacacacacacaaagtaggagaatggaccgacagagatatttttggcaaatgctcacatcagagggcgtcctgttccgcagctctaaatgaatccgtttgtccatctccatctctcgcgctctctctctgcagaggctcccgcgccggcggaattcaatcaataaaccccgaacccacggccgcgcgttttaggactttgaaggctcaaccagctccgctcggttctcgagcccccagcacccgcggcgcacactaacctgatcaccgtggaggcgggatcggcggctccgcggacgagtggcagcggccttagccaatcgccgccgagggtctccgggcaacaacgaatggtggcggaggcgggggggaagggaccaatgggcgggctgcgcagccggccagggaggctcagccatttggttgtggtaccggagacggacccctttagatttcggggcggctgaggagcgcggcggcagctcggttgctgagctaggggggtgggcggaatggcgggggaagggaaggtgactgtgcctggagggccaagccgcccggcctcaccagccccgcagccgcctcagcgtttggccgggggcggggccgcaggtgcgttatatgaaagggaggggcgcggccggaggggccgggggttggggttctcgccgggcggagggcttcgcggggtcgccctgggcctaccctcgcccctccactgggttgtggaaagaggcaggcagtgcgaggcctgggggcagcggactgccccgcgggcgggcggatgaaaggcctggaaagagggggaggggtcaagggtgcagtggggggaggggtggtctttttctgggtcctttgggccgagctagtggagggtggctgctgcccccatctcttttgcgggttccaacccctgagctacagcccacagcccgcgcgccccttcgcctcccgcctcgtcgtagtccagccatggccatcgtagtccctcgcatacttcagtaaataaaaagcaaggtgcgtccacctttgggtgacttaacctctcggtctcgaccctctgcatggaggggcatttcagtttgctgttttactagcttggaaggaatgatcaccaaaaggcacacaggatcttagtcaataagtgaatgaagagcagggactaaaaattgatactgaatatattgaatattttaaataaatgaaaaggaaggtgcttgtaactcctggttttctggaccaaaaataatttatgggctttattgacctggtgaaataaaacggcgcacagtttattttaatcgtccacctgagtcatttggttcaatttgggttgccaaagaagctctgtttggagcactttctccaagttgtacggtttgcttgctttggattttttttgaatcacattggttgtaagagaccttaaagccttaattcccacttgattaccaacttccgtgctaggaccttgttgtgtactaagttggctgcctgtgtctgttaataaatcatggggattgttgtcaacaaggacagatacatctccacaaaactgtttttccattcttttatttctacacagctacgctcttcctcctcatacactccgaggtagttcttttggatacattgtgtttatttttcagggatgtaggttcaagtgagatacaccaatatgtatgttgcaaatttgagatgttacgtaacaccaatacagtttcattcttgagcatataaaagttaggaagaaataaaaagtggcagaatgtaagtaaaagtcacatatagaatgcttacaccgagggaagaaacagtggtaactaatattgtaacctgatggattgcaaatgtgagatcctgaagctaagcattttactcagtaaattcttctttcagataaaatattaagtgggatttgaaaagtgatcatgtttactcttaagtagctgggaaatgcaagataaaaatgggaagtcattgttttatttcatctgggtatgttatatatacttgttgacttattgacgtatcagtcttcctcagttttgttaatcttattaaagtccatttgtgtagttggaatttattctttttaaaattgtattgacttcgttattaaacatattgggaccccgaataacctctttgccagagtcagttcctatttctggatgtggtatttaaggttgttttaaaacagagctcttcatcacaaacacattaaaccaatatgatgtataggaatctatataacacaggagtcatgaagtttatgtcctctttggtggtaaatgttcatcttcaatttaaaaatttgatcacaactaaatccacactgctagcaatgtgataatatgggacagtgcctttccagagaagtaatcccttaaaagccaaccaatcaaatgctaagatgtcccccatccagctctgccattcggaagcaaatagctcactttatggaacaaagactggagagaataaagcccaaatcttggttaaaaagagtgtccaggaacaagttagaatcaaaaaagtcatgacttgattactagtcaaacagttgttttagatataacagcttttgtactggttttggaaaactgaaagaggcttccttaggagttcctgtcatggcacagcagaaacgaatcccactagaaaccatgacgttgtgggtttgatccctggccttgctcagtgggttaaggatccagcattgccatgagctatggtgtaggtggcagatgtggctcggatttttgctgtggctgtggctggcagctttatctccaattagacccctagcccaagaagtttcatatgccatgggtgcagccc

SEQ ID NO: 2 - DNA, 39564 bp, Sus scrofa
gggctgcacccatggcatatgaaacttcttgggctaggggtctaattggagataaagctgccagccacagccacagcaaaaatccgagccacatctgccacctacaccatagctcatggcaatgctggatccttaacccactgagcaaggccagggatcaaacccacaacgtcatggtttctagtgggattcgtttctgctgtgccatgacaggaactcctaaggaagcctctttcagttttccaaaaccagtacaaaagctgttatatctaaaacaactgtttgactagtaatcaagtcatgacttttttgattctaacttgttcctggacactctttttaaccaagatttgggctttattctctccagtctttgttccataaagtgagctatttgcttccgaatggcagagctggatgggggacatcttagcatttgattggttggcttttaagggattacttctctggaaaggcactgtcccatattatcacattgctagcagtgtggatttagttgtgatcaaatttttaaattgaagatgaacatttaccaccaaagaggacataaacttcatgactcctgtgttatatagattcctatacatcatattggtttaatgtgtttgtgatgaagagctctgttttaaaacaaccttaaataccacatccagaaataggaactgactctggcaaagaggttattcggggtcccaatatgtttaataacgaagtcaatacaattttaaaaagaataaattccaactacacaaatggactttaataagattaacaaaactgaggaagactgatacgtcaataagtcaacaagtatatataacatacccagatgaaataaaacaatgacttcccatttttatcttgcatttcccagctacttaagagtaaacatgatcacttttcaaatcccacttaatattttatctgaaagaagaatttactgagtaaaatgcttagcttcaggatctcacatttgcaatccatcaggttacaatattagttaccactgtttcttccctcggtgtaagcattctatatgtgacttttacttacattctgccactttttatttcttcctaacttttatatgctcaagaatgaaactgtattggtgttacgtaacatctcaaatttgcaacatacatattggtgtatctcacttgaacctacatccctgaaaaataaacacaatgtatccaaaagaactacctcggagtgtatgaggaggaagagcgtagctgtgtagaaataaaagaatggaaaaacagttttgtggagatgtatctgtccttgttgacaacaatccccatgatttattaacagacacaggcagccaacttagtacacaacaaggtcctagcacggaagttggtaatcaagtgggaattaaggctttaaggtctcttacaaccaatgtgattcaaaaaaaatccaaagcaagcaaaccgtacaacttggagaaagtgctccaaacagagcttctttggcaacccaaattgaaccaaatgactcaggtggacgattaaaataaactgtgcgccgttttatttcaccaggtcaataaagcccataaattatttttggtccagaaaaccaggagttacaagcaccttccttttcatttatttaaaatattcaatatattcagtatcaatttttagtccctgctcttcattcacttattgactaagatcctgtgtgccttttggtgatcattccttccaagctagtaaaacagcaaactgaaatgcccctccatgcagagggtcgagaccgagaggttaagtcacccaaaggtggacgcaccttgctttttatttactgaagtatgcgagggactacgatggccatggctggactacgacgaggcgggaggcgaaggggcgcgcgggctgtgggctgtagctcaggggttggaacccgcaaaagagatgggggcagcagccaccctccactagctcggcccaaaggacccagaaaaagaccacccctccccccactgcacccttgacccctccccctctttccaggcctttcatccgcccgcccgcggggcagtccgctgcccccaggcctcgcactgcctgcctctttccacaacccagtggaggggcgagggtaggcccagggcgaccccgcgaagccctccgcccggcgagaaccccaacccccggcccctccggccgcgcccctccctttcatataacgcacctgcggccccgcccccggccaaacgctgaggcggctgcggggctggtgaggccgggcggcttggccctccaggcacagtcaccttcccttcccccgccattccgcccacccccctagctcagcaaccgagctgccgccgcgctcctcagccgccccgaaatctaaaggggtccgtctccggtaccacaaccaaatggctgagcctccctggccggctgcgcagcccgcccattggtcccttcccccccgcctccgccaccattcgttgttgcccggagaccctcggcggcgattggctaaggccgctgccactcgtccgcggagccgccgatcccgcctccacggtgatcaggttagtgtgcgccgcgggtgctgggggctcgagaaccgagcggagctggttgagccttcaaagtcctaaaacgcgcggccgtgggttcggggtttattgattgaattccgccggcgcgggagcctctgcagagagagagcgcgagagatggagatggacaaacggattcatttagagctgcggaacaggacgccctctgatgtgagcatttgccaaaaatatctctgtcggtccattctcctactttgtgtgtgtgtgtgtgcgttggggggaggcactttttttggggggggcgcctaggagatgtgggtttgggggtcggactgcaaatgaattgcaaggttggggggttgcaatgccatccgatcattttctggctgtcgccgccgctgcccttggtgtgtgactacctgtgcgtgtgctcccgcgtgtgcgagtgtgggtgcgagagtgtgcgtgcgagtgtgcacccatcgggggccagcgggcgcacgcgtttgggtcggagagaatgaggcagaataaccctctgagctcgctgctcgcgtgactccgtctaggggaaagattaacgagggaggaggaggagaggggctgcctcctggatttaacaacaaaaaaagggggttttatattttataaatgaatccccccttcctcccccctcccgcgccttccccctccctttctccctctctctccgtctctctctctctctctctcgctcgcacacacacaataagttttgggcttcgcgagtccggtttagtttctgataaatgtgggccgaggcccctggggagagcgcatggggagggggctgcagcggagttgggaatggctcgagtttaaagtgcgtcttcatttctttgcagtgatgaggcgagagacgggggagccatatttgtaactttgtagtgttcgtgaacgcgccctttctctccctccctccctttctctgcctcctttcctctcctcctctttctccctcactctttccaccccaccttcgggccagatgctgatgtttcttcctttccttctgaagggaagataaattggaagaaggggggggagggattttcgaacgtgcaaaggcacagataatccccgcgcctccccacctcgcgcgatcgctactgcaagttacccaaaggctaagtccaggtcctccctctcccccttgctccttccagcctccctaaggtgccagccttcgagccgtggcgccccccggcaccgacccctggcctgtcttgtctctagggtgggctccttggcagccattcggcgacgggttaataaatgggcccgggaaactttgtcaggacgcgagctgcccagagctggtgcccgtggtgggtattggctgggtccagatttatgcgggcataacagacacgcagctccgggatgggagtttgccttcccgtcgccgttattgattgggcagaggcgcgagtacggccagaggaaacttacacggatgggaacccggaggctctggccaaagcccacccctaaggaggggaaaggtgagggtgggttactcgaacgaacacccgtttttatttctgtctccctctcgctttcagtgttttatgtgagttggcggctcagcggaggagacccagggtctggggtggagacgctggccgactgccctcgtggcacctcccgggacaagcggagcgcgggcggaggaaccccgcacccccagcccgggtggccggggttccacagagttgggagtttgggtagcactgtgcgctgacctgtcgccgcttcagcccgttaaaacccgaatccctggcggaggcaggccttgcttcctcttttctctagttcctcccccaaacctgagtgagacttttgaaaacaagatcctttttgtgcccccccatcataacgcagctgtggactgtcgacgtgcagtgccttatggcgcgcagggcggggagggggtggcggagggaggggaggggttgcccgcccgaggacgcaggagtttccgcgaacaatttgccggcggtttgcctttctctggccggtttcatcccagcttggacccggagccggaggactggggggctgggtgtggtgatgggggagggggcccgagccgcgggcttcccgcgtactttccggaagccccccgtgcggagggggaagggcgccgagtagggggtcggggtcgcggcgggagggtgtggaggcgcggttcgcccggcctaccccatccccgctgctggccaactgggagcgagatcgaaagcgggtcgaaccggctctttaaacttcgccgagtgtgtgctgggggaggggagcgcgccgcgccgaactgggagcgatttctcacgcttcgccccctcgcctccgagcctcccggcccacacgcctgccccctgccttgaggcggggtggggcgcgggtgagggtggagggggcactttctgcccgtttggggaggagggggagaaagctagctaatgagggacaaaaggggtgggggaggagaaactggtctttttaaacgttcttaagataaatagctcccggagaactccccctgcgcccctccccgccgtgctctcccccgggtcccctcacacccaccttcggagcctctcccaactctgatccgagggccggtggccacgccgcgacgccgaaataggacgagcagccatgtttcccgggtctcgcgcggcccgccccgcccctcccccatggcgcggccggcgccgagcgcggggctccgaatgcgggcgccaggctccatgtggcgcggggtgcgggctggttggcaggcgaccgggtggcctggccctgtgcgcgcaggtcgggtcgcggccgcgccgggctggcccccgggcgggccttttggctttccgagctggttttgagctcaaggtgttttatttattattgttgtttttttaacggccgaagccgcccgaggccgaatccgaaggggcgccgaggcgttatggggggggcagggacggccgccagggtcctggtcgcctgtggcacgactgctgggcgccgggctgccattttgtcaccgtggctgttgtcgctgttgggggggggacgcagactcttgcgccatcgccccgacggccccggacctggagacagcagggggagccggtcccagggaccaccccccccagttgtactctgggcccccatgccggtcccctccctgtgccaactgcctgaggctctgctggagcgccgcggcggccgtggctccgtagggtgacgatcctccctgcgagtgctccccccaccccccggcgcgttctctgcctcccccgcccctcttctcgccagtatctcgcccttcctcctgcaggcgttttagccgtagttaaatgtggccctaaagacgaacggatcgccctggtgtttgctctttggcggaagtgataggagggtggggggagaaattaaacaagaggtttcttttgggggaggcgggtgcgcacgcgactctagcggccctgactgaagccaagaaggcagccgtttacccgggagggacgagttgatgcgttggggaaacgccctcaggggctgggctctccgggaaggtaggtcgcgctccgcgtttcaggtgggtgttgcagcgccctgctggctgctaggggaggcccccttgctctttttctgctcctcccccttttatttgtgcccaagggaaggcagctacagtagtaaaagtaaccctaaacggaaaagaatagggagtaaggtttgccttttaaaaagtaaatgtctttttccaaccacctttctctggctcttgactccagagccaggaagggcatcgcgtcgctgaagtctctctgggactttttaaaagttgatatggatgctggttaagcacctcattggttaaactctactagacgtctgcatggagactttcaaggcagtgcccgactaaggctgcccagaaagtaaggtttaactttgacctttggaatacatcgcatgatgttttccagactgacttactgcctaattgggttcaagtagcctgatattaactccagtttatgcaagcctaccagggatccaggggcagaaaattgagcatgagttccctatagtcatggtcagtactgttttgttactggattcccgttcttgatggtagtgttgagcctgaggggttcacagtgaagctgggtagtggaaccatgcaggcctgagtttgaatgcttcctgccacaaaagataagttaacctgcctctttgatccttgatttcctcgcttgtaaaatgggactaataatctcatttaatgagtcagtgacaaaaccggcctgatctgtccctcgggtgctcagtgtgtgatagtgttattctcagagagatattggagtgtgatgaggcacaactttgagcttttctagggtttagagaaaaacaacaatagctggtgcttatatagtacccatgctatgcctggggcagttgtaagtggattacacaaatcaattaatttggtccccacagcagcactgtgaggcaggtactcctattatccttatatcacacataggagattgaggcataaagatgttatcacaggcagtctgcatactcaacctgcactctttactgcctcccctgaagcccccttatttgtaatatacggtgggaaagagctttttctttggctttaaaatggagccaccttatgagagagaagcctgggtagcctctgggttgaagatactgaggtaggtggtcaggatcagagactctgtggattgcggttttaagggggaagccatattacactttcctactttgggttagcacaacacatctggttaggctgaaatgaatctggccttttaggtgtcgggggacacattttgagtaatgagaagataagcaggagccactcagtggtgtgtatgggatcatgcatgtaatgtgttttccactttcatcagtctccatctacagaccaaaagctgaacagaattggcatgtccttagtttctaggacctagtttaccaataacactttatggatcatctcacttaatcctcccccaactcctcaagggtaggccaggcaaggctatgtcgtctcggttgcaggggtgaatcatccaggttgggagagaaggtcagacagccagtactcttcactgttgggttcccccattgtaaaacagtagggactttgaaaattggatagactatattgggtcctcagtggcctcttaccagaatcacctgggaagcatgtagaatgcaggttcctggctccactgctaggcattggtttagtactggcattgccaaattttgggtgagctgcctgtttttgtatcatgagctaagaataattaattagtacgtgtaaacattgcaatcaatttgatgatgtggaacactttgaatcccaattaagtgaaatgttattatcccccttccccctgcaaagaattcttatctccttagacctttattaccaaaaaaattgtacttattatatattttgtattttatcaataattgtagaaatgtgttttcttacaataaaaaaagtgcctatgtagtactgtcaatattacctctaggtaaagtttactgtttggctctttacagaagtttgataatctctggtttagtagattgtggggaaggactttgggatctgggtttttatttttattttatatttttatctttttagggatgcaccctctgcatatggagattcccaggctaggggtcgaatcagagctatagctgccagcctacaccacagccacagcaacaccaggtctgagccatgtctgcaacctacaccacagctcacagcaatgctggatccttatgccactgagcaaggccagggatcaaagctgcatcctcatggatactagtcatattcatttttgctgagccatgatgggaactccctaaatttttttttttaattgttaaaattttttaaagcatgtgacaagcctttctttttggtggtgcttaaagggggtctttccaaggccttttacatgtgccctttctctagttgatatgtagtggaaattggcttcaatccatgaacatccataagaagagaagtagtacttactgctggtgtaaaattgagcattccttctattcagaagttattctctgtaaccaatggaaattttttatctttcatattcaaaatatttcaaaaggcttttgtatatcttgtagttaaatggttacccttaagatttagatgtcttcaaaactagagggaaggactttgaactgcaacagtttgagctttgaggtccagaaggtgcagtagctgtgtacctggtgactgacatcagactctcagagcacagaccattgaaaacctgcggataatcctggaatctctagtttgggcctgctcctcttccaccagggcatattgcctggggaatgtaccaagagtaatgtggctttgagttccagagcccttctttcaacttctagtctcttgtgcctgagctaatgagtggaagaaatagatgtacgattggcctggccaggaaggaggcaataaatctaaggggagcaggcccagtcaccataactgtggcctgtactttacagcaaaccacagacccagttccctctctgggctgctgctgcacctccagcctctcaagatgacttactctagacttaaacaagcctccttatttgtaatagaggcacctgattgagctatgggggctggttgtccagaacttcgttttgtattaattataccatattgaaataaaaatctcagggctgttggtaatcctttatggaatttgtgtaggatgcttatcagatatctccttactagtgtgcctgccctctctaccttggtgtatcacttaggaaaggagcagaaagcttgttgctgagtggacatgagctctggtcgaatgagcttggcccagttgtttggcctgaaatctaacttggtgaagaggaggctcattactctggtgtccagagggggtactcccttacagatgccatgccctcctgccctggacacacattttgccctgtctaccctctgctctagctagtgctctagtctcctaagaagtaccttccatcaatctcattcaccaccaccttcctcccacagacagttggagaaatagggacctgagtctgaatcttatattacattgaactataattatatgacaaatgataaataacccaacaaggatgttttcattaaagagatggagtctggcagggatggaaacttgtgagggcatctgttattcagaacttctcatttagtaaaatggtgatgagcaaagcacccctagccctgcagtctcccagcatagaaccagttgtcctgataacatttgttaatgagataagatgtctttgtccccctgcaccaggtcccatccagtgcctacagggccacaccctgcatcccctgtgtttccactcaaatttattttctttcagctctgcagctgccctggtgcactcatctagtgccttttttaccaaaacttgctccaggcagcagatctaaaagatcagtttacttaccccactatcatttactctaatgtggattaaagtttgggctgtctttcccatagggatttacatttggagattccggtttggtgaggaaattaccagagagctattagacacttgggtgctgttctcagctttgtgattaacacacttggacatgttgtttggcctctttgggcctctgtttactctaaaatgagagcgttgaatgagatcagtgactttcaaacttttcgttcctatagtaagatctatgttttacatgactacccagtatgtataaacatacacacacaggttatctcagaaactgacaatgtgctcccttattttgggtaaaacacttttcattaacagaagtgttctggctttgacccatgaatcgatttcattacttgttaatgtttgaaagacattaaaagatgaatattaagattcccacactcagatattttgtggtttgttttcggggaatgagggaatgccatttgctgttttgtgaaatcgttccaccaagggtcagtagtgattcctccaagtttccttgctgtgcgagtggccctctaccaagcatgttcttccaccccctctctactctcgtcacccgctgctgccctcatcactcagtgcactgcactgggagccccgacattttccaacgcgggaaagagagggttgggcagggggaggtctttggccttggcctcctcggactgcctgggtgtgctccttctcattggcgctgtaaaatgatgatgtaatagtgcctataacacagtctggcacacagtaagcactcaataaatgttagatgtcattgttatgttctgccagaacaccattgttggcattcactttaacaaaaaaaaaagcttatgttatggatagacacgttgtatcaaaaagtaacatttgtttcaatggaaaaagaggttagaagctagagtttcaaacatggcagaggttgttttttccccacaagcaattcaacaggaatgggtggcatctgagtgtagctatagcatctaaacatcatggagcagccccagcaccagattccaagtcgtttctgctgagggtaatatcacaattcatccttttcctgggcagcgcattgtcactacttcagccactatttcttcagtctctactcctcttgactgcccagccaccctccacccctccttcccagccagcaaccttcccttcacagagaaaatggacatctcttggtttcctaagaaattcccggacaaaacccatgcccagctcagctgtcctttgagtcttacctcttttgcccttcagttatctttttccttctgggcacctagctgctctcctttgggtccttctcaagcttgggatgtttttcccatcttaaagcaagtaggaagattctcttgatcgtctctttagctactgggtatctcttgctttcctttttatttttatttttatttttttaaattgttcttgccttttagtgccacacctgcagcaagggaagttcccaggctaggggtctaattggaactgcagctgctggcctacaccacagcttatggcaacaccagatccccaccgactgaacgaggccagggattgaacccacatcctcatggatgctagttggatttgtttctgctgtgccacaacgggaacttctctttttccttttatgttcaaacttcctgaagtgtctgactgtaacttcctgctgacttctcttacacctcagcctcctcagtccaattcctgaactgctccccaaatcccaatagcctttattgtcttttacatgactccttagcagcccttgaccttcctacccttgaccttcatgaggtgtgttccctagtactgctccctttctctggtgagctctcctacagccttggcaactcctcagtttccggggtccttttgctctccctcctgcagctgtgaagtattggactcggtcaagcgcagtctctgaatgctctcttctgtattccctccctacagactcttcttcttcctcactgacagctgcaggtgctatgtgctgcctggggtctgatgtttacacctccagcctgacctcttggctaagcccaggatgcacctgtctcaaccctaatgtccccagagtcggcatgtccaaagggctgcacacagcccccttgaagccttgcttcagacttcaaccagaatgatcttaccacaatgtgagtgtaattgtgtcgctttgtgcttaaaatacaccattgtccttaggataaagtccagaagccttaataagaacaactaggatttttcatggactgcctctttttttcctcacccccttcccactgcactggcctcactcaccagcattgatgctctcgaatccattctatgcttgaactgccaccatcatgtccttaacatctaatcatctttaccatctccttcatcctccacccctcctctagctctaggtctcatttttttattctaaaacacttatagacatttccttcaaagagcttcagtttgtaattagatattcctgcatgtgagtgttggaaatagcattgctgtccccacgtagcccataggctgcatgattgagggggcctatttgggctcagcactgcacttggcatgtgtcgggcattgtagaagtattggttgagtgaaggagccatggtctttgcacgttcttgtcattttcatcacccatggtctggtgagccaggcacaaagccactgaaacaaagcatccactgaggtttggtgtcctcagctttcccttgggtcggtgtgagctcccgcatcctgattcacactttctcagcccagtggttttcacatttttctgggttttatatcccatgtcagtaaaaatgtgaacctgagccccagccctaatatgtctaccttttagttacaggtgactcacatacacttcatgtaaatatgcatattgtgaaacataacaaaattaaaaagataagttaaaaaatattaaacgtctgagtatttttttcctgcaccagtctattgtctgggggccatccacttgggagaccacactcctccagtcaattgcctgtgttatttttaatttggttatgaaagttcatgccatgtaagaaatgcctgggccttatcaagctctccttccttattaagatcttcccaaccctggtgttgatgggtaggagtggagcgcattcctcacccttctttgataagcagggaaaatccgggtctgcccgagactcccagcaaatcaagtgtccgctgctgcctgtcagctgggtgctgcctggtcaggctgtgtgcacagacacacccaagctccctcaggtcgtctcttaagatccagtaaggctagcccctgggctactcctgcagatgcttggaaaggcccagaagtaatcaggtgagaggatcccatgggccgcggacttgggcgagtcagggaagggggaggaggtgctctcctattatcctgcaggctggaaatctgtcagaggcaggatctgtgcaggctagaagggcaggagttgatcaccacagggaaacctggagaagacaggcccgccggtgtttctatgggggcacttcagaaagttgtgctgagtctctacagtcagaagtggccagaagctctggatcggtggattctgctaccttttgccaagggcatgagtgagagagtgagtgagctgggagtggattgctgggggagagactcattctacataaccaactttcccctgagctattgcctcaccaacaggccgggtgctggggctgtggtgggagggtgaggggagcccactttcacctgtgagcacaacattaggaatgttctgtaagtatccgtgtagcaggtagaatttattgaatctcattatctgtgctctgggctgggggaggtggtacgcatatggggggagtgggttacagaaagctggcatttccagtttctgtagcagagttggggaggtatagctaacacggcacttaggcaggaggaaaggtgtgtggttggtaaggcagatttcaaccccagctgtgcatcagaacccaccaggggagcattttaagaaattcccaggctctacccaaccaccaagtcagtctcccaaggtggtgcccagtctctttttagaatgctctaaagtgagctctaaagcatggctgggtgccgccacattgagtcagggtgcagaacttcacagcaggtaggaagaagtaaaccaaatggatgtaagagagaggaaaatggagcaaggaaaacagcaaagaggaaagcaggtgcaggatttaacctgctggggtgctgggacccggttcttagcctgcccatccctgccctgccctggccacacagatttcacatgtgcccgcattcctgctcatcacatttgtgattttttgtttactggtatctcatgagtgctaagcgggatttattgagtaaggctggatttgatccatccttggtcttcagggaactgagaggctagtggatattttgtaaaaaggagggaacctaagggccatgcagtcaggggtattgggctgtgccaggaccccctgagccccatcacttgaggatatctggcaggtcacctttttgaacctcagctgcctgacctgtaaagtggtgactaacactaatacctgtttcccaggggctgttgtcaggatggagagaaataaggtttatcccaggtatggactgtggacagcccctgaagcttagtagattctgaccagcctaggcttgattgagctgttggaatggtgtagacagccctactgaggaaggcccttgctcactatctgagcttgtgtgtggcgggagtacttaggagggctcacttggagctgctcaggtgggtgggcgagggcaagaagggccccaggcttcttgttgaggtggagctggagcaacatcagccaagcacagaggtcccctgctctagcacccctgcccatcaggagttaggggctgtctgcctgtcttgctctgtaccagtagtaccacttgcctctcaactccctcctggctgcagaactctaggtctgcccctctcaagcctttgtctttcatccaaatggctcctgagaagtttcccccaggaagtcttccttgactcactagaataatgggaacaaattatgtccatcccaggtgatgtcaagatgtaagatcctgggacttccgggtcacacagtagtgttctctctcctgacactggggtcacctccttggagtgtgcatcatggcccctctttcccttggcttggtcagtgtctctttaatcccctcgccagagggcctcgctgagtgttcccagagcccaggacagctcccctgcagctgggtgcatcaggaaggctctgtaatgatgtcatgtggcctccagcctcccgcctggcggccagtgggaaggatctgtctgttctggcacaggggccgcttccatatggagggccaggaactggccatcacagtcaccggggcgttccttccattgctgcatgtttcccctcccctctggaagctctcaggcgtacccctgtgcaacccagggagagtgggcaggcgtggactggagtaaagctccccagctgtctgggaggcctgaagaaacctctgcagaggttggcctgctgccataatgagtggttctcctctgagctcccatctagcttgtggctctgttgcagacaagcctttgtgtgtcttggatgagagagctggtgtttttttacgctgaggtatggtttctgagtctggggaggcttctagtgtagggccctctgaggcctctgtttggggtgaggtacagcagtaggcatgggagaagaaatggaatgttggcttctcaaaagtgaggggtacttggttcagatacttggcctttgtagatgttcaggtatctttccctagttccagtggccagtgtggtcattgtcagaagtggccacccatgtgggtcagatgtgggaatggaaaagcacctgtgaggttgatgcatggccttagattccagggaggtctggatcctgctttgaggtgtccactatgcccaaaaccagacttatattgagtgcatgccttgctagccccaggagtcttaaaatggccacagatgtccctgatgagcagcagtgactggctagggcctgaggttaaccagagttaggagggtgatttctgcagatagaaaatactgcggaggatcattcatttttacacgttgattgaatgcctgccacgtggtgagttgtgttctgagcattctggatatagcagtgaacaggagaaggtcattatttgggctgcccctgtggggcttccattccatcaagggaaaccattaataagtcaatcaaaggcatgactgctggtgtgataggtctcatgaaacataaagctgtgttaaaagggactaggtggtccaggaaggcttctctgaggaggtggcatttgagcaaagactcgagtaacctacactagacttctggcacccatgagccaggacctgtagaggtacctaggaactctcttgctgaggagcaagctgaggcccagaaaggataagacttgaattcatgagctgattaattggaaagttgacctgaaacaaaagagtgacaaactgtaatgggccagtactccctgttttcaaccttaggcgtgtccccaggccaactgaccctctgccttttcgtcccagaatgtcctttattatcctcttgagacttagctttttaaagatttgtacttccaaattgtgtttattaacaatggtaggtttaccttctcatttgtggctgagtacgttgaggagagtggggagcagaaacacatctgtaaccgccagtcatccccccaggcaagggctcagcacctggaactggccttgttcctgtctcagcagagatgtggcccagtttgggtaaccacaggctctcgctgcctggcacagtgggatttccatctgtccttctgaaatagtttcttgactgctactttttgggttccatttggatccttcaggccctctcacctggtttgaggggccagatgctttgggtgagcaaaggagatcctgctgaaacctctgatgaagggtggtgaggccgggcttggaggccctagggcttattttaaggggagaaatccacagtcaggtcacaaatccagccatgacccacctctcccaaggaccgggatgagccttaattggctgagagttttcatctaaaagcaggcatcttgcatgaatatgaaaggagcttctgatgaagtaagacttcattaatcagcctgttaggaatctggcttcccagtattatgggggctggataatttgatgcttactgttgtgctttcagcttataaagggaaggcactagattttcatctttctgctaaatattgagagaaaatagtatctttatgtgctttgtttgtttttaactgttgagtatctgggtgccagacaccatatttattcttacttaatctgtatagaaagactacagaatgaatgggattattcccactttcgtagatgaggctcagaaagctagtgaagtgtctagctcaaggtcatatagtactgtggagcagtgctgggtacaaagccaggccactggcttcacaccttaactttgacctcttacctcctcccagccactttagggctgctgctaatatggaaataataacttcagactcctaactttcatttctttctcttctctgttaaaatctgctgcatttgttcccccaagaaagtgaaacagatgatactagaacttgtgacttttaaaactgttttattgtgaaatagaatacattgtaaatgtgaggttcagtgacttttctcctttagattttttttcccctttaaatgattcttttacactatcagggaaatcccagcaaaatcaactttccatatgcctgtcctgacctttctgtgccagggtcttaatatatgtgtgtctgggtttccactgacagctctaatatacttcaaacatgagggcttgtgcatgccaatgagaaagtacttaggatacctcaaagtgtgaaagagggtctggaaagtgggaggaagtccaaatcgtcctccaataaaagttgcctaagacaacttggggcttaggtgctacttcaaaaactaacaatgcattccacctttcccaaggggaagtgttgtgaatgggcatggcagtgccgtgtttcttgccctttgttgagcacctgctccaagccttgcttcatgctaggtttttggcaagcatcacatttgaatcctttagaatgcccctaggatacaggtgtgaccactccgttaccagatagagacacaggtccacagaggtcagatggccttcaggacacactgaacttgcccctgtgtgctgtagcagtcccttctgcttgtccatcccagactggacactttgggggctgaaggcaaggatacctttattgttggagcctggcgcagtgcctggcattcataggttctaagtcatagcattgaatggacggaggtgagttaacttgtccacataggtatagtggtgagcacattagattgtggaactccaggtctctatgactgttgcccagcaggtcagaagtggggtctgattctagctctttggttgaatgcaaaatggcatatgtgctggcttatggacattgcagcattgttatagcagaagactggaaataacccaaatactcatcaatcaggggctagttaagaaaaatggtggtgcatgtacaccatgaaacagtgcaaattagaaacaaggaaggtttttatgtactatatattacacaaacttcatgaaaaaaaaggtaaagaacaatatataatatactaatttgggataaaagagaaaataagattctaaatttgcttgtgtatgtgtaaacaaactctgggaggatttttaatgggtgggatagttaactggatagggtgggagagagaattaactgtatgttttcttaagttttttggttttgaaaccatgagaatgactgtattgcttattcaaaaagttaaaaagataaaaataatggaggtgaccttggactagctattctctgtatctgggcttcagtggattagatcaggccttcatctggagtggcatgttgtgtatctattgtgtatattgtgtctctctggctttcatgagctcttccggaagctgctgcccctgtcctaggatggtctgtagtcccttcttccattggtggcctgcacctgaatcatcagctcagagtgtttgagaaagactggggtgacccagagagccagaggccttctgcagaggtgtcaggccttgttcctgtctccaggcctgggactttatcctctgaacaccctgccctgatgtgactcaggtggttcttcccctaaagtgaaggattacagagactgttctggagcattctggcaaagtgtgctgcagtttaatgggaagaaagaaatggcagaatgttttcccaggttatttttaatgcttttcagttcagcaaacatttactgcgaactaagtgcaaggcagtgtgggggactctgagctacataacacctcctctgctctctggggcgccaagtttcgggtaagaaacttgttcgtaaaattcctccctgtgccctccaggacagcacggtttgcctctagtcccgcagagttttgtgggattggtaggaatccttctccccattttacagatgaggaaagtaagtctcagtgaagctttgcccaaagctgcagttcctaagtgttaaaacctggaaccgacaaaaaaagacacacacaaaaaaacctggaaccaaaccacactttctgatggtgtctcgtgtgcccagacacccatgagtaaaactttctgccaaaggatattccccaggggtgcaggcaaggcctgtttctacctggaaacattgggtgagcacagtcctgaataaagctccttttttcctttaaggaagggcaagagaaatcacaggcttatgcctgggtcttggatctgaacccctttgctgtggtccaaacagttctgacttccactgcttgtgaagcccatcactctggcaccaggtacatgattctagaacatcccataggtgtgtacaagtgcgtgtgacagacagtgggcttctccccatctcattctcacattatcactctgtttccttcccttccacaaattccgtcaccagtacccatcgtcctggctgatccccaaaaggaccaagcatgctgcctgctcagggtctttgccctcggtgttccctctgccctcttcacttggcttcaagtcctcactgaaagctcagcttagaaaggccttccccaggatcttttgtgaagtactgtcttttgtcacgatttcattttttcccctctgtccctttgttgcatttatatgtatcgtacatagatatctatacttactggcttattatctcttccccactagattgtaaacccacgggttaggtgcctgtttttgttcattgctgtttctgtttcctagcacaggtgcccagcttttgacagatactctgtaaacattgttgaatgaataaatcaggcctgtggcctaaacacataatgcttctttaaagagggaaagcatcaaatcatagcattttaagaggaggaaagatccaaggctcatctctttgcagggcttcatcatacaatattattaattcatttaataattgttcagtactgttcatgtggaaagttctttgcagaagtcactgagcagcctctgatgcatacacttacagggacaggggctcactgatttgtcagagcagcccattctttggtgggacaagctgcaaagatttgaacaccctcttatgttttatgttggtccaaaaactgcctatttgtaattcctgcacactgaccttagctcttgagctgctggagaacacagaataaatgtactctgtttgcatacagctctccttccaatagtcggagaaagatagctatcatgagttcccccaccctccagcctaaacatcactagttccttccattgttcttccagtgttacggtttgcagatgccttcctacccttggtgcctgcctcaagtttgttctgcttcgggtgtcagaatttaaggtctggacccatcagaacagtgttttgggaccctgaccgaggacgcttggtccatctcacttgtttctgtccacacagcctgtgttggccatcttggcagggatctccttcatgagcttttgatgaaggctaactaaaatctctaggctctttttttacattatgtctattcgtctagcccctccctgactcagcaagaatcgtaaaggtttgggggttttgttttgtctttgtttttagcatcttgagattaaagcagctgtagatctgtgaacagcaaagaatgcaacccgtgctcgatttcacaaaccagtaaatataggtaaagttctctcaccaactctggaagtacagaaaaacccactgagcctctaactttcttgcttctgccctctttttgatgcctgtgtccttttcacagagtctttctgtagcttactctccctcggtgttccgtccctctcccctccttccttcctggctctcattccattgccccgtttctcccttccagttagtagtgtatggaattaacattactccttagcatttcctgcacttccatccccagtacttttaccttcatttccagactatggcaagctgcacatcacatttctctaaggcagaaagagatgaaattgcttcttatgtgtgacccttggctaatttgttttgtggtcttggatagagaaaaaaaacttacagccctcagccttaggttcttttgcatgattggttcacatttctgcccaaatcagcggtttccagttggtggttggacacaagggcctcagcaccgcggtgtttgctctgcttctgtcattgccaatgctgctgtcattttggtagaggtggcagggaaggaggccaaggtcgagggtttcttctctgagccacttagcctttccccgcctcttctgccctcccagccctcctgggcagtgtggggaggcaggcaggaaggcgggagggctggggtcaggcccggggctcttttcctaacagctgtgttctttttcctcttttgtttcctcttgcttcaaggagttcaccgtggagaggcctgtcatgctggggtgtagaccccaagttaggaggattaagactggccccaggttaggttctacattgggctaaactgtgtgaccttgggtgaggagctggattgaatccagtggttccccagaggtggcgatgatggtgtcctttagtttctgaagcacatttctatagccagctggaaattcggcagaggcccgtactagcctgccagaagtgtcctgtcctgaatctgaatggcctggtgtctttttaaatgggctatgttgctaggctgggaaggggctgtgatctgctggctcatgatcgctacatggtgatgccacggaaattaattaacttttgttgtgcaaaccattcttccacttggtccatggggagtggatggctgtctccatccacaccagacccaccacagaaactctgagctatgtccccttttcacaccttgctgactcgactccggtaggatttccacaagtggtcccagcccagctgggcttaaatccctgaaattaatttcaggagtcaaaatcagccaaaaatcaggcagctgagacagagggccaggaagccattttcgcatctttttgtgtattttcccaagagtagagttggggtgctttgcttcaaaaatgaataaggggtcagagccattgctctccccaactccatcctttcttctagggtgagtgagctggttcagtttgaccacttagccagcccctctgggcagggcaccagaaggggataccaagatctcagaccttaccaaggccgtgtctgggggagagactgtgaggaaagactgacaggtgtcttgtggccaagcagcagctctctgggtgccctggtgggggacagggtgtgttccctggggagggatgggaggagtggaattccacttggctttgggttcaaggaagtgaggcctggggaagcacttcataaacgattaacacagggaggaaatgccaggtggtgtgaagtgtgtgctgccagtcacgggcaaaggggtggtgcaggaacaggcttgaaaagagacatggggatttagtcagggggcattgatggtcagggggctgggagtcctcctctggatttggcgcctgatccccatgccgtttaaaggcttttggacagagagcgactagacatgatgtgatgtgatcgaagcagtgttttaggaaggtggcccaggatgtaccctctccgctctctgggccttcctcatcaagctccttggggctcttctgttgtgtggggccaatgcggtggctcctagatcatcgtgggtggtgtgggtctttttatgaaccacaggatcatagagcagtcattaggaccccatgagtccacgtgcctactccctgctgtcctgtagggtgataggcatcacatggggcaaggccagatgcccatatttgaaaccagcaccttgagcacagggggctgtttttatgatcctggtgtgttttaagagactacatgattgactttcgcatttcggtaattatccgggataattgcccagcgtcctagatttcctttctagcatccttcaaccatgactcctgggctcctctggcctctgaagtcccccaccttctgttgaggaacataactgagtttggatgtgggacgggactaaaagtggatgggcccagtgaattttggaactaaaagggatctcgtgtctgtgctccattgtttagtgtgtggattagaggactgcagaagcccagagagtggatgttacttcccccagggcacactgcaagtcagtggcaaagtggggcccagagtccaggtcgttagactgcctgatgagcatcctttgcaccacacctccatgtttcttgtccccctttccccggccaccgttcagacaccacctgctggtaactgtgccttcactggactctgcttccacctcctgcttcttcacgccttccattacctgctgaaggtagcacaggacagccacttagaagcagcctgcttcacttgatcatgtcattcatgcaccagttccagaaccctcatctcttcctgtccccgttgcacttcctttcccccagacagccttctgggcctattctctgctgctctgggaatcttttacctgctcttaaatcaggcagggctagggcaggagctgggcaatcagggaaggcttcctggaggtggaactgccaagtgtctgaagtagaatagaatctagactggctggaagagaggaacgaggtttgaggggaggagagcaaaggcatgacatgagggaggggcccaagctctgccaggctcactggctaaacaggcccatctgacaagcccaaagcccaggtccgacagcaattgcaccagttcttgagttactgagtctgttctactggccagatgaagcatctgcagtggaaccagctcctctgtcttggtgaggcagaaaccaagtcctcctcaagcttgggggaggaggtaggaagccggttccaggcagcgagggagccagtcacagggtttatgttaatacgggccctcccccagccggcgcttagcctattacccgggccctgccgacagcttaattaccgctgcagcgagcctcggcctgccctccacggttccctaaaataataaggatggcgtcaccgacttcccgcggccatgtgctcccacccgtgccttcatagctctattgtgggaaacaaacaaaatccagagatccagatgcttttttcttggagattttttttggggagcagggttaaagtaaggtgggaccctgccccgtagttaagatttcaaaagatctctaataggtatggagacctgagtcttagctccactgaggttgcagaataacctcctgttagcagaaacgaaaaagctgtgtggttgattctgtggtcctccaccggggactgtgatttctgattagagcagtggtgtggtgctgtgcagtgtggtgtagcagagaatcacctatctcggggttcctgggctctaggccaactctggaccttgtttcttcctctagcaaaagagagctgaactagaccagcaatttgcacactgtgggtcacacttgttaaaaaatcatcttttttaatgtaatagaaaaaagtaattgtaacagggctaagttttgtttcagtgtgtatgcctgtttacatgcaaaaatgtgcttactgagccaaggtgtaaatgtatttatttttttgactgtgggctatggtcagagagccactgacctagatgatcccgaaggcctttctagctttcataatgtccagattttctcccagacttgttccctatggaacctgacaggatttttcagttttgccacactgactcctaagcaaaactagagattgtatggttaaaactacaaaaccacaagcatctatccctcctatcgaacacctgggaggaagcccatctccccctgcattggtgtctcagacagtttggccttcaagctagaaatgggatctgcaacaggggatggcccatttaaaaactgacctatttaaaacccatgagcactgaaaaaacacggggtcaatctgatttaagttgtcttcttttgcgaagctgggacctgaaagctaaattggtcggggactgacaaggttgaaaccaaagttacaaatatttattgcattcttgttcagtgaaagaaaagatcaagcctcaagtttagtggaaaaaactacacaaaaggaggtgtgggtgtaaagtccagcagggtgcattctgggcacaccatcttcactctccagaatgtggagaggccttcattccatgaagaagctctgcagacagcggaggtgactcagagctgtgggcctgccttggttcccattcttgtgccttgactgcagacgcagcagtgaaggtggctgtgcattgagaaggcaggtggctttttccaaggtgggggtgctctaagtgcactgtttaatttaatccaaccccaggtgatgggcactatggtcattggaggaagcggaagcttcagaggtgagatgagcttgcagtggggaatttgggcttgagccagatctgtctgactccagagcctgccttctgtccacctctccaccttgcctcagcaagtgctggaaaaataaaaagcagtcttctcttcagtttccttctctctggtgctggtcttccgagggctctgctttaggcccatgctgtccatttaaatcggggctagcgtcacgggcatgtgacctgtgcagtcacacaggcccacacctagcgggtccctccctgctcttgggtttaacatgctactgtccctgtcttggaattctttatcgtccttgagcaggtggtctcacatttgcattttgcactgggccctgcaagttacctgtccaactctggctttgctgtaaggcaccccttttcttggtctttctggggccctcctatctgcccggaacgttcccatcctccccaggtagaggcatgtgaagcacaccccccaccccagccttgggcctgctatctggcacactggactgtagttgtttaccagctgtctgtctctttcttgcctgccaccaccccacttgctggcaaggaccccaactgtggctcaccgtcacctctgtgtctcccctcagctgctcagatggacagtgtcacaggagctcactgtgtgaagagaggggtttctcacacacgagacctgtgtgcagagagcactgggtcaggtcaagaggaggacgcactgctgacctgcctccttatgggattatgcttgtctcagggacacagaacacaccagaagtagtagttgtttttgtttgtaaaaaagggagggcttgttcaacctgttttggaccagttgcactgaaagtttcactggtggtttgtctccctctgtatgctgggcacctaatgttgtggctggcacaataaagaggacatttgttaaggagttgatgggtgtccactccccgctaggctgattacagagaaggacagtccctgacctctaggaggatcggatgcttaatacatgattaaatgattcatgcagcagctgcccttggtgccccgggatgcgcagagctggctgcagaaggctttctggggagggggcttaactagagctaaaggcaggggtgagaggtggggtgtgaagagattggtggacatgagggcaggtggtcaagagtgaaagacctccttaggtccgtttgggaccttgatgatttttttcccccccggaggcaacaggaagccaggaatgttttctaggccagagtttgcactttataggttacacagataccatcgtcccctttctgtgaggcagatcctgagacctcggggagagagtcagggtcattcagccagccaggccttggcctccaggtcaaggcctgttccctctgtcatggagaccccatttggaagcagaggcagacctagggtgtcttagatgaccatgaccaagactgcagtgccggcagcagagaggaatggtcaaatttgagagatcagtaaagacgagatttcccagttttgaaacaagcgacgggttgttccttagaggatagtgtgttggtgtttatcacggacagttcagctccccttgatgagaaatggctgctgtgtccttgctttggggacacgttttgcaggaaatgccagagccaggcagtctgatctcttgggggctgagtacgaagatgcaggcacctctcaggtgtccacacttgagaaatgaagcatagggtcctgtgtaggtttgttgttgaggtgtttgaaaagctcccgacagaggcagaagaactccagttgtcggactagagagagagtaaccgcgtttggatatttttaaacggccagtggaattgggagagagtctaaaacccaaagtacaaattttcagtttaattttaactttgcacttagctcacacccagggtttggcagcggggaatgggccttacttttctttttttcttttttttcttttttaagcagaacacaccctggatgtaaaagggatgttctcttcacatggaagagtttggggcggcagcaccgagcagagaggggaggaagtgggttggaattgcagcaggatttcagagtcaatttaaggaagattggggtggttggatgttttgaaacacatgagcctggcttgggagctgtaagagagcatggccctgtgtggaggcaggtggagcagggggtggacagcagacttccacaggtcagctgttgcactggagttttttttttttttttttttttcttctatttgatccattacagacgcttcacaggctgcttacctgccatctccaatgtgacacatcaccccaaaaagcagcagtgggtttcctccgatgtggtgtgggctttctggtgatatcagcatcgttggggtgtaagcctcagcccatctctcccctccttgatctcttcccaaactgcgccaaaaccctgccaggaaggaagtgcagaaagcgtggtcatcctggaggccccacagacctgggagagccacccggcttttcagacaccaaaggctttccctcccaagtgatgagaggtggcctcttgctccttggggaggagcaggcagggtctcaggccccctggcccctctccagaactgccctccctctcagcagcgtcatcagagcttgggctgagctggttttgtgctttggttactgaggaagtgtaaccagggtggggatggctgggagtggcccccacttggctagtggaacagttagaagaggggctgaaggatgtgtaggtacagtcagggcagcttgttggattgaattgggggggtctggaaacaatgaggaacccctccttatcctgcaacacttactgccgccgggagtctgaacacaccctcctatgcccattcctgggactttaggaacactgagcccaatgtggctataaaatgggagaacaccccataataccccatggagcagtcgtgaggattggatgagatagtgcctgtgaagagggtgcctgctgagggcccaggaaagatcctgtggtagctgttactataaacagtaatggtggcttgcatgttgtccccgaggggagtggccaccactttgggcttggtgctgggagctgggactggaacctgtgtctgtctataggattctcaggcagcagcatgcctcttcaggaaagaggccgacatccgggaggaattcccttgactccgcagcaccacctttccttgttcctgaggccttctccttggctgatggccatagagaagctcttgacccgtctggaaaaaccacatgtctgaaatctttgagggtggactggaaacccttctcatatttttcttttatgaagcttaaagaattcccagggccttccaaggaaaggagtgactgaagacgcctagggcgcgtgactccagcagtgactgcgcacagagggggtggctccccctccttagtacagttgatctctctccacttgctctgctcccctaaggcctggcttcctggctctacactgatttcctgccctagggcaaaggcctcacaggatttattcccaggcactcttgccagtgaccttgagaaggtggcctgacctggacatctggcctctcctggggactgagagggtgggaaaggacataactaccccattccagatccaaggggaaggtggccctggcaccagtgcctaggccaagagcttgctagcttcctggcagattgctgctgtcccaggctgagcgggttacccctccaccagggaagaaagcagggcagctgtggggccctgtggccagatgcgccctgatgttccctggtctggtcactggtaagggtagactgaggagggcatggcaggcctgctgtggattctgttccccaagttggcccatggtcccgtgatgcccaaggaggagggcatcttggcagacagtcttcctgagcccttcaggaagaagctggtcagaccagcctgctcagaggcagggagcagccccagacagggactggttagaataggcctgtctacttatccgtgaggagaaaaggctatgaggggcaggaatgacaatgctattgagaaggacaggcctgtgccatgtgaccaggggtgagaaatgcaaaccggtgggtatgtgggcatcagtacatgtttcctagaggctgcaaggagcaggcaggtggggatactatgtcgagcaccaggtgccaccaggagggatcacctttaaggtccctgcaggccctggaagcccagggagcagcccccgatcagcttggaacaggagtggaaaactctggtcatccacctggagaagcgggcaccctggcctcccttgctgactcccctgggtcatttcaggcctgagacctgatgactcttcctcagccatctccacaccacctgtgctggagccaggacatgccttcagccaggtctgccttttaacagcgaatgagacggtagctctttatcagttctttctacctcattcgaaataaaggaggtagggcccagattgtaggtaagatgagaagaggggaatctaagaactcttaacagggcaaaatcacctccagggtggtggcgggggtgggagtggggtcatggcacgcgtggccacagaagtgcctccaaagaccaacttttggactttgccgacctgagcatttctctgcggggccatcctgggtttgtggacgttcattctccttccacctctactcttaggactctgcagagaaagtctagtgctgggatattattccatatggtagcttgtatgtgtctctttacacttacattaaataaatacagtgtaaaacttagctcctcagtctcacctcagtgactgcatgtggctagtcactcctcccttggacaggaagttctactgggcagtgctggtctagagaacagtgagtcagagagggtccctggtccgctgcccttgctctggggcaggccagtacagtgaccaggtgatgaatgcctgatggcaggggcaggtaagagcaagcatgcgggtgggtctcgggacccatctgaccgcagaaggtcacagacacacaggtgaaagggcagtgggggctgaggatgggaagaagtaggtccctggcttcaggaacatggccaggccgaggccacacggggcactgagatgagaggctctgacagaatgacagggcccagaggttgcctaacaacgtgatgtctggcatggtggggagctgggggttttattgttcaatggaatttggaagaatgtggcagttgggtcttgccgacagcagttgggtttatcgagtttgctttctccagtccagtcaggctcctggcgggggagtggggggacctcctggtttgcagctctgctcacgccagggacccccctccccacagtgttgctacaggcagaaagcctggggtgggctctggctctgccatgctctagaggtgccttctggtctgcctcctgtcccctccccggtcttgggccccattcctcaccccattcacgccggccttgtctttccaggtgaaagagctcgtcctggacaattgtcggtcaaatgaaggcaagattgaaggcctcacagatgaatttgaagaactggagttcttgagtacaatcaatgtaggcctcacctcagtcgcaaacttaccaaagttaaacaaacttaagaaggtaaatagagcgcaggaggggctatgcccgggaggcctgccagttccccgagcctgtgtgcgggagccaggcccttgagcccagggccttcgttattgtaagagctctttttgctttttctctccctgccccgtttagcttgaactaagtgataacagaatctcagggggcctggaagtattggcagaaaagtgtccgaacctcacacatctaaatttaagtggcaacaaaattaaagacctcagcacagtagagccactggtgagtcactggggttctctcctctgtactggggtgggagggattgatgttggggaatgctgcctttgatttgtataacatgctggcgggtgggaggggatggcttatctcactttatttgactgtcattatatgctgtgagatggagttggagctcctacttctgctttgtccatgaagaagctgaggcctagagacgttaaagagcttgaccaaggtcaaacggtcagaacaggcatcagggtgaaggaaaccctaagtcccaggtctcggcttccagtccagcacttttcctcttgagcgtttctgcccagccttggaaacccgagctgtcatttcttcaggcttagagcacggcttgtgcccttcactggggaggggggaaccacccaggaattaagcttaccctggaggtggcgacctgttttctccatgggtcactagccagaggctactgcctctagattgtggcaggtggtcctgacacaggcccctgggatgacagagagctgtgtggcatgggagtcccatgtaggctttcctctgtgagcacagagcagagtggctccgggtcatcagtcctgagtgtgatggtgaccagggcctcagagccctgggcggtttcttcttctgctcgttcacatacagctgagcataccctaaactttatgattcactagccagaaaggggtaggtcatggtcagaatagcaatttctccattatcctggtctgagtgaatgtattcttttgagttcaaggaaatcaactgtaaggtgtgtcattgattaatgatagcttttttgaaatatagaagtactactgcattacattaacacattgtaaatatgaatttgttcataagccatgcaccttagaatcagggaaaggccatgaggatatttggccaagttggccatgtttttcttttctgggtagatagggtggcagttggggcatctctcagggtttttgtgcaaaaagcattccttgccctccacagaagctcagggttcaggttcatgggccagcatggcagaaccggaagcagacatttctcttccaaactcagactttacctgcccttgaccaggtctcagtcacagactcttaagagagcaacctagttcctgacactgaccataagagacagtaactttaatcaccagtcaggcctggccccgttggaacagggacttggcctggggcagggtacctgtgtcttgaggggaatcaagatgtagctgttccttgttagctgtgtgaccctttcacttcctaggcctcagattccagccaccaaacaggtgtaaggtgtagtatgggctgaaactaatcggtaaaaagctttgcacaaagcaaatcatgttaagaactactgacaaaatctgaagacttcatttcctcttgtcctttttgaaagtcggtgttggaagagtaaaagcacaggtctgaggttgggctgcctgatccaatcccaattctctgctctcttcttcctcatctataacatgaactgataattatttctgccttattggggctataaggataaattgagttaataaagtgctatattaattgccgttattacttttattcacagaaggagttagttatgttcctgtgcccttctcagttcccctctggcaccttagtcacaggagcaggcagcaaagcttttggcaccaagagagcccggtttatttcaagcccgccactgttacggcaaaagctgtcattgccaaacaaaagaacgaggtcttgcagatccttaagtccaaccccccatcttccagataaggaacatgaacccccccccctccgccgcaaaccaggggtctcatggctgagcaaagccagagtttgcttgtcacctgcgggcgggaagctctgcacacctctcgtgtcacccccaactgatccccctgccactgtccactctgtttgcttgcagaaaaagttagaaaacctcaagagcttagaccttttcaattgcgaggtgaccaacctgaatgactaccgagaaaacgtgttcaagctccttccacagctcacgtatctcgatggctacgaccgggacgacaaggaggcctctgactcagacgctgagggctacgtggagggcctggacgacgacgaggaggatgaggatggtgggtagcaccagggagaggccaggccaggctctggagggggtgggctgggcccctgagggcttgttggctgttgacctctctattctagagctgtggagggaagtgggctgtctgctttgtatattactgtccctgtctcattgatccactgccctaaaataacaagacctaagtcccagagaaacatcccaaagattctccaaccacaagtaactccttaaaaaccatctgagtcctcccttctgtttttttcccttttccaaagtcaacaatgagatcctatagcatctctctatagtgtgacacgggattcagatattcttccagggaggggatgaacagaaggaggaaggtggcttgtggcctgagggtcccctttcccatccagggtccagtggagaccaggtcatggctggagaggttgtggggccctctggtggctgctgcccacaggacaggacttggggggggtgttgaattcaggagccctgggggcctgagaagcggtggaggctgcaggcagcttgttgggcttccaggcagtgcagcgagcagtcaggaacaagaggaaggagcacctcctgtccccatcccacgccaccagctcagtgaggccaccctgtaggtctttcagccagagtaaagttgaagactgagacattgcccgaataattcagacatgagtttgttttcccttgttaggtgagagtatttggcaaagtattcagacaccctgtttgccttagtttgttctatcttctgattctaggcccagctctgtagctaattgcatgtgtgaccttgaacaagtcgcttctcccctctgggactcagctttctcatctttagagcagggagcttggctagatgctctttgaatatactgacttctcctttttctcaagccctgtaactaggctctctggtctggcattgtctttgctgtctcagcttccatgagggaccttttgtcctcataaaacttgagagaagggtttgcctttggcatcactttaggatgccttcaatcatattcatgcatccaggctgggggagagtcatgggcccctcacgaagaccacctcccatgccagccccatcagcgtggggcctgtgctgtgtgagggaggggccagatcaccaccggttcattcttgtccccatttccgttgcacagaggaagagtatgatgaagatgctcaggtagtggaagacgaggaggatgaggaggaggaggaggaaggtgaagaggaggatgtgagtggagaggaagaggtaagagtctgggccgggggaccatctcccagagtccccccttcccttgctttgccagggaagtcagtcccaccagataccccagtgatcagcctgggcagccaggagccctaattgggattcgagtccatttcagggcttgtgactgggcggcgtcggggagagaaggcttgtagccagccttggaaaaagaggagggaggggattccaggggcaggtaaggagcggattcatctgccagggcgagcctggccctcatttccatgtgaaaattagttcttgcagaatccatgtctgcattttccagctttttgcattttaagttaatttagacattcactgagcacctagagtgcgctacggaaaagccaagactgccttaaactgatgggtgataggatcagatactgctggatcccacacccgagtgtgattagggttctgtgcacacagtgggtagagggccattatcctaatacactagctggcatttttttttttaacaaggtctgtgatgtgtctgtgaggggtggatcccagctctatgactcgctacctgtgtgtccttggacaagttccttgaccttctgggcctgtttcttcatttgtacaataggcgtctttttacagctagcttgtaatagggatcagctcactggactgtaaagaggataaactaatttgtaagtaaaatgcttaaggacagggcctgacaagggagtctttgagcacttacactatttgagacttttacattcttctctgaggtcctggctctctgtgctgggttttgtgtttggatgtgttggatgagagtcttggactctgtagtagagtcattttccctgacttttcagatttctaaatcaactcttactatttgcaaaagttagactgagagggtttaaatgtcagtgtggacaaggtacctgccttctccccctgcttcttgtctgcctccatcaaggagggagacacctgtcttccacacagatctgctcaggcaggacctctcagccagccgcacacagactggggagaggcagagcagaagtcagtgggaaagctgctaagatagacttggctcctgccgccttccactgctaggtgtctctgctccccaggtgtgggtgctaggctcacctctgaagatcatagtgtattttaaaaataaagacttagcaaaacaggcccccctaagatagggcaataagttgtgttgactaatggattcttcatcttgctcttcctgtcacaagagctgccagcattttgttttggggttaggttgtttgttttggtttttttttttgttttttttttttgtaatctcattggccatctgcagatgtctagcttttccagtaaaggagagctatacacacacagtcttagcaaacagactggttaaggaactatttggtgacattataaaaggatatttcccttgacaaaaagaagtctattgccaagttctttttaaacaatgggctgtctgatgctttaggaacagcattcaacatgcagagtttcaactagcctggaccttaagaagcagcacaaagcatggtcctgtgttaggtgaattcacacccgttcgtgaatcccaaggagctgggaataatggaggagggggttgaatttttcctctcctccaagtgatccaagtttgcaagatggtgaggggctgggtaggatgaggctggattcacccacagaagttggatttttaaaactgaggtcttcctctgaagccaaaaccagactaaagcctgaggacaagacagcctacttcacatggagcttgtgctccaggagctcacactggagagcacctgagttatagtgatgcccaggtcagaaattcttatccctggaggtagaatccaccagcccctgacatcatttgcagatactgtgtgagatgtgggtactttctaggaaagaattcaaggctttctgcagattcctaaagggaatcctcaatgcaaaagaacctctgcactgtggagtcacctgcgttgagcaggtcctaggggctctgagaggctgggggcagccctcagctttttgggctcagtgtcagggagagtggcttcccttggcatgtcctgagaccggggcatccttaatattcagtgttcatcttctctcctaggaggatgaggaaggttataacgatggggaagtagacgatgaagaagatgaagaggagcctggtggtatggcagcctttttactctctgctggtagaggctggccccttccgttgataggagatcacatgggtcctgaagacatggcactgggcagaatggggcttcccttgctttgcagagcccccatctcgctttgctagggagagagagcatcccagatatatgatcccctgctttcccagcgggtgggttgagccaggggcaagatctatgtttaatccaaatgccttttctccttacttttccagaagaagaaaggggtcagaagcgaaaacgagaacctgaagacgagggagaagatgatgactaagtggaataacctattttgaaaaattcctattgtgatttgactgtttttacccttacccccccaaatcctgccccctgaaacttatttttttctgattgtaacgttgctgtgggaacgagaggggaaacgtgtactgggggttgtggggggagggagggtgggagggggtggaataaaatactatttttactgccactctttattttttttcccctactttttctttgtgtctggttttgtccctgtaaatgcgatagctgagtacccacaagtgagcgtttgttctgtgccctcagagaggatggttggagatctcttacctttcttggtatttctgagtctcttgagttggaaggccatggctggcctcagtttggtttctcaaagcccaggaggggctgagcaccagccgcatcttacctcttgttctggttcccatgatttctgaatttcttggacttgctagaagcagtcagcgccctggtttgtaaatagcaacctgaaggcgtattttggcaccggtcgggggacccttcccgtctcccatcccctttccctctttgcagatggtggtgggcttcgctctccgaagaagaccctgatgtcactcttgagttgatgagccagagagctgaggacagcaggcttctgagttaggagtaaaatggatttggtaattagaatcaaatgagaagaagcaaaccctcaaacttcaacctctgatattttttaaaaagctgtcctatatcttgttctgtaaaatagtagaacgctttgttttacaaaatgacaagagaattcttgtacgtgtcctcctgtgcttagaccatttttacaaacctaagcacaggagacgctgctgcatgtcagctgggtttcgtttttgtttttttcttttttttttcatacacctgagcacggaaaaactaacgcaaaattgtattttcttacctagtggaaacctgaaatgactgcaaattcctagtgaatgtacaggtttgctttcctgtccctcttctggattgcttttgaagtgacgtgcgatttccctagcccgtgtttcatctgtataaaagacatctgcaccagttttcctccccctcagaagagccaaactttgagttttatgtctgtttgtcattgataaatttcaataaatctttttatacaattt

SEQ ID NO: 3 - DNA, 31996 bp, Sus scrofa
agtgtgcgccgcgggtgctgggggctcgagaaccgagcggagctggttgagccttcaaagtcctaaaacgcgcggccgtgggttcggggtttattgattgaattccgccggcgcgggagcctctgcagagagagagcgcgagagatggagatggacaaacggattcatttagagctgcggaacaggacgccctctgatgtgagcatttgccaaaaatatctctgtcggtccattctcctactttgtgtgtgtgtgtgtgcgttggggggaggcactttttttggggggggcgcctaggagatgtgggtttgggggtcggactgcaaatgaattgcaaggttggggggttgcaatgccatccgatcattttctggctgtcgccgccgctgcccttggtgtgtgactacctgtgcgtgtgctcccgcgtgtgcgagtgtgggtgcgagagtgtgcgtgcgagtgtgcacccatcgggggccagcgggcgcacgcgtttgggtcggagagaatgaggcagaataaccctctgagctcgctgctcgcgtgactccgtctaggggaaagattaacgagggaggaggaggagaggggctgcctcctggatttaacaacaaaaaaagggggttttatattttataaatgaatccccccttcctcccccctcccgcgccttccccctccctttctccctctctctccgtctctctctctctctctctcgctcgcacacacacaataagttttgggcttcgcgagtccggtttagtttctgataaatgtgggccgaggcccctggggagagcgcatggggagggggctgcagcggagttgggaatggctcgagtttaaagtgcgtcttcatttctttgcagtgatgaggcgagagacgggggagccatatttgtaactttgtagtgttcgtgaacgcgccctttctctccctccctccctttctctgcctcctttcctctcctcctctttctccctcactctttccaccccaccttcgggccagatgctgatgtttcttcctttccttctgaagggaagataaattggaagaaggggggggagggattttcgaacgtgcaaaggcacagataatccccgcgcctccccacctcgcgcgatcgctactgcaagttacccaaaggctaagtccaggtcctccctctcccccttgctccttccagcctccctaaggtgccagccttcgagccgtggcgccccccggcaccgacccctggcctgtcttgtctctagggtgggctccttggcagccattcggcgacgggttaataaatgggcccgggaaactttgtcaggacgcgagctgcccagagctggtgcccgtggtgggtattggctgggtccagatttatgcgggcataacagacacgcagctccgggatgggagtttgccttcccgtcgccgttattgattgggcagaggcgcgagtacggccagaggaaacttacacggatgggaacccggaggctctggccaaagcccacccctaaggaggggaaaggtgagggtgggttactcgaacgaacacccgtttttatttctgtctccctctcgctttcagtgttttatgtgagttggcggctcagcggaggagacccagggtctggggtggagacgctggccgactgccctcgtggcacctcccgggacaagcggagcgcgggcggaggaaccccgcacccccagcccgggtggccggggttccacagagttgggagtttgggtagcactgtgcgctgacctgtcgccgcttcagcccgttaaaacccgaatccctggcggaggcaggccttgcttcctcttttctctagttcctcccccaaacctgagtgagacttttgaaaacaagatcctttttgtgcccccccatcataacgcagctgtggactgtcgacgtgcagtgccttatggcgcgcagggcggggagggggtggcggagggaggggaggggttgcccgcccgaggacgcaggagtttccgcgaacaatttgccggcggtttgcctttctctggccggtttcatcccagcttggacccggagccggaggactggggggctgggtgtggtgatgggggagggggcccgagccgcgggcttcccgcgtactttccggaagccccccgtgcggagggggaagggcgccgagtagggggtcggggtcgcggcgggagggtgtggaggcgcggttcgcccggcctaccccatccccgctgctggccaactgggagcgagatcgaaagcgggtcgaaccggctctttaaacttcgccgagtgtgtgctgggggaggggagcgcgccgcgccgaactgggagcgatttctcacgcttcgccccctcgcctccgagcctcccggcccacacgcctgccccctgccttgaggcggggtggggcgcgggtgagggtggagggggcactttctgcccgtttggggaggagggggagaaagctagctaatgagggacaaaaggggtgggggaggagaaactggtctttttaaacgttcttaagataaatagctcccggagaactccccctgcgcccctccccgccgtgctctcccccgggtcccctcacacccaccttcggagcctctcccaactctgatccgagggccggtggccacgccgcgacgccgaaataggacgagcagccatgtttcccgggtctcgcgcggcccgccccgcccctcccccatggcgcggccggcgccgagcgcggggctccgaatgcgggcgccaggctccatgtggcgcggggtgcgggctggttggcaggcgaccgggtggcctggccctgtgcgcgcaggtcgggtcgcggccgcgccgggctggcccccgggcgggccttttggctttccgagctggttttgagctcaaggtgttttatttattattgttgtttttttaacggccgaagccgcccgaggccgaatccgaaggggcgccgaggcgttatggggggggcagggacggccgccagggtcctggtcgcctgtggcacgactgctgggcgccgggctgccattttgtcaccgtggctgttgtcgctgttgggggggggacgcagactcttgcgccatcgccccgacggccccggacctggagacagcagggggagccggtcccagggaccaccccccccagttgtactctgggcccccatgccggtcccctccctgtgccaactgcctgaggctctgctggagcgccgcggcggccgtggctccgtagggtgacgatcctccctgcgagtgctccccccaccccccggcgcgttctctgcctcccccgcccctcttctcgccagtatctcgcccttcctcctgcaggcgttttagccgtagttaaatgtggccctaaagacgaacggatcgccctggtgtttgctctttggcggaagtgataggagggtggggggagaaattaaacaagaggtttcttttgggggaggcgggtgcgcacgcgactctagcggccctgactgaagccaagaaggcagccgtttacccgggagggacgagttgatgcgttggggaaacgccctcaggggctgggctctccgggaaggtaggtcgcgctccgcgtttcaggtgggtgttgcagcgccctgctggctgctaggggaggcccccttgctctttttctgctcctcccccttttatttgtgcccaagggaaggcagctacagtagtaaaagtaaccctaaacggaaaagaatagggagtaaggtttgccttttaaaaagtaaatgtctttttccaaccacctttctctggctcttgactccagagccaggaagggcatcgcgtcgctgaagtctctctgggactttttaaaagttgatatggatgctggttaagcacctcattggttaaactctactagacgtctgcatggagactttcaaggcagtgcccgactaaggctgcccagaaagtaaggtttaactttgacctttggaatacatcgcatgatgttttccagactgacttactgcctaattgggttcaagtagcctgatattaactccagtttatgcaagcctaccagggatccaggggcagaaaattgagcatgagttccctatagtcatggtcagtactgttttgttactggattcccgttcttgatggtagtgttgagcctgaggggttcacagtgaagctgggtagtggaaccatgcaggcctgagtttgaatgcttcctgccacaaaagataagttaacctgcctctttgatccttgatttcctcgcttgtaaaatgggactaataatctcatttaatgagtcagtgacaaaaccggcctgatctgtccctcgggtgctcagtgtgtgatagtgttattctcagagagatattggagtgtgatgaggcacaactttgagcttttctagggtttagagaaaaacaacaatagctggtgcttatatagtacccatgctatgcctggggcagttgtaagtggattacacaaatcaattaatttggtccccacagcagcactgtgaggcaggtactcctattatccttatatcacacataggagattgaggcataaagatgttatcacaggcagtctgcatactcaacctgcactctttactgcctcccctgaagcccccttatttgtaatatacggtgggaaagagctttttctttggctttaaaatggagccaccttatgagagagaagcctgggtagcctctgggttgaagatactgaggtaggtggtcaggatcagagactctgtggattgcggttttaagggggaagccatattacactttcctactttgggttagcacaacacatctggttaggctgaaatgaatctggccttttaggtgtcgggggacacattttgagtaatgagaagataagcaggagccactcagtggtgtgtatgggatcatgcatgtaatgtgttttccactttcatcagtctccatctacagaccaaaagctgaacagaattggcatgtccttagtttctaggacctagtttaccaataacactttatggatcatctcacttaatcctcccccaactcctcaagggtaggccaggcaaggctatgtcgtctcggttgcaggggtgaatcatccaggttgggagagaaggtcagacagccagtactcttcactgttgggttcccccattgtaaaacagtagggactttgaaaattggatagactatattgggtcctcagtggcctcttaccagaatcacctgggaagcatgtagaatgcaggttcctggctccactgctaggcattggtttagtactggcattgccaaattttgggtgagctgcctgtttttgtatcatgagctaagaataattaattagtacgtgtaaacattgcaatcaatttgatgatgtggaacactttgaatcccaattaagtgaaatgttattatcccccttccccctgcaaagaattcttatctccttagacctttattaccaaaaaaattgtacttattatatattttgtattttatcaataattgtagaaatgtgttttcttacaataaaaaaagtgcctatgtagtactgtcaatattacctctaggtaaagtttactgtttggctctttacagaagtttgataatctctggtttagtagattgtggggaaggactttgggatctgggtttttatttttattttatatttttatctttttagggatgcaccctctgcatatggagattcccaggctaggggtcgaatcagagctatagctgccagcctacaccacagccacagcaacaccaggtctgagccatgtctgcaacctacaccacagctcacagcaatgctggatccttatgccactgagcaaggccagggatcaaagctgcatcctcatggatactagtcatattcatttttgctgagccatgatgggaactccctaaatttttttttttaattgttaaaattttttaaagcatgtgacaagcctttctttttggtggtgcttaaagggggtctttccaaggccttttacatgtgccctttctctagttgatatgtagtggaaattggcttcaatccatgaacatccataagaagagaagtagtacttactgctggtgtaaaattgagcattccttctattcagaagttattctctgtaaccaatggaaattttttatctttcatattcaaaatatttcaaaaggcttttgtatatcttgtagttaaatggttacccttaagatttagatgtcttcaaaactagagggaaggactttgaactgcaacagtttgagctttgaggtccagaaggtgcagtagctgtgtacctggtgactgacatcagactctcagagcacagaccattgaaaacctgcggataatcctggaatctctagtttgggcctgctcctcttccaccagggcatattgcctggggaatgtaccaagagtaatgtggctttgagttccagagcccttctttcaacttctagtctcttgtgcctgagctaatgagtggaagaaatagatgtacgattggcctggccaggaaggaggcaataaatctaaggggagcaggcccagtcaccataactgtggcctgtactttacagcaaaccacagacccagttccctctctgggctgctgctgcacctccagcctctcaagatgacttactctagacttaaacaagcctccttatttgtaatagaggcacctgattgagctatgggggctggttgtccagaacttcgttttgtattaattataccatattgaaataaaaatctcagggctgttggtaatcctttatggaatttgtgtaggatgcttatcagatatctccttactagtgtgcctgccctctctaccttggtgtatcacttaggaaaggagcagaaagcttgttgctgagtggacatgagctctggtcgaatgagcttggcccagttgtttggcctgaaatctaacttggtgaagaggaggctcattactctggtgtccagagggggtactcccttacagatgccatgccctcctgccctggacacacattttgccctgtctaccctctgctctagctagtgctctagtctcctaagaagtaccttccatcaatctcattcaccaccaccttcctcccacagacagttggagaaatagggacctgagtctgaatcttatattacattgaactataattatatgacaaatgataaataacccaacaaggatgttttcattaaagagatggagtctggcagggatggaaacttgtgagggcatctgttattcagaacttctcatttagtaaaatggtgatgagcaaagcacccctagccctgcagtctcccagcatagaaccagttgtcctgataacatttgttaatgagataagatgtctttgtccccctgcaccaggtcccatccagtgcctacagggccacaccctgcatcccctgtgtttccactcaaatttattttctttcagctctgcagctgccctggtgcactcatctagtgccttttttaccaaaacttgctccaggcagcagatctaaaagatcagtttacttaccccactatcatttactctaatgtggattaaagtttgggctgtctttcccatagggatttacatttggagattccggtttggtgaggaaattaccagagagctattagacacttgggtgctgttctcagctttgtgattaacacacttggacatgttgtttggcctctttgggcctctgtttactctaaaatgagagcgttgaatgagatcagtgactttcaaacttttcgttcctatagtaagatctatgttttacatgactacccagtatgtataaacatacacacacaggttatctcagaaactgacaatgtgctcccttattttgggtaaaacacttttcattaacagaagtgttctggctttgacccatgaatcgatttcattacttgttaatgtttgaaagacattaaaagatgaatattaagattcccacactcagatattttgtggtttgttttcggggaatgagggaatgccatttgctgttttgtgaaatcgttccaccaagggtcagtagtgattcctccaagtttccttgctgtgcgagtggccctctaccaagcatgttcttccaccccctctctactctcgtcacccgctgctgccctcatcactcagtgcactgcactgggagccccgacattttccaacgcgggaaagagagggttgggcagggggaggtctttggccttggcctcctcggactgcctgggtgtgctccttctcattggcgctgtaaaatgatgatgtaatagtgcctataacacagtctggcacacagtaagcactcaataaatgttagatgtcattgttatgttctgccagaacaccattgttggcattcactttaacaaaaaaaaaagcttatgttatggatagacacgttgtatcaaaaagtaacatttgtttcaatggaaaaagaggttagaagctagagtttcaaacatggcagaggttgttttttccccacaagcaattcaacaggaatgggtggcatctgagtgtagctatagcatctaaacatcatggagcagccccagcaccagattccaagtcgtttctgctgagggtaatatcacaattcatccttttcctgggcagcgcattgtcactacttcagccactatttcttcagtctctactcctcttgactgcccagccaccctccacccctccttcccagccagcaaccttcccttcacagagaaaatggacatctcttggtttcctaagaaattcccggacaaaacccatgcccagctcagctgtcctttgagtcttacctcttttgcccttcagttatctttttccttctgggcacctagctgctctcctttgggtccttctcaagcttgggatgtttttcccatcttaaagcaagtaggaagattctcttgatcgtctctttagctactgggtatctcttgctttcctttttatttttatttttatttttttaaattgttcttgccttttagtgccacacctgcagcaagggaagttcccaggctaggggtctaattggaactgcagctgctggcctacaccacagcttatggcaacaccagatccccaccgactgaacgaggccagggattgaacccacatcctcatggatgctagttggatttgtttctgctgtgccacaacgggaacttctctttttccttttatgttcaaacttcctgaagtgtctgactgtaacttcctgctgacttctcttacacctcagcctcctcagtccaattcctgaactgctccccaaatcccaatagcctttattgtcttttacatgactccttagcagcccttgaccttcctacccttgaccttcatgaggtgtgttccctagtactgctccctttctctggtgagctctcctacagccttggcaactcctcagtttccggggtccttttgctctccctcctgcagctgtgaagtattggactcggtcaagcgcagtctctgaatgctctcttctgtattccctccctacagactcttcttcttcctcactgacagctgcaggtgctatgtgctgcctggggtctgatgtttacacctccagcctgacctcttggctaagcccaggatgcacctgtctcaaccctaatgtccccagagtcggcatgtccaaagggctgcacacagcccccttgaagccttgcttcagacttcaaccagaatgatcttaccacaatgtgagtgtaattgtgtcgctttgtgcttaaaatacaccattgtccttaggataaagtccagaagccttaataagaacaactaggatttttcatggactgcctctttttttcctcacccccttcccactgcactggcctcactcaccagcattgatgctctcgaatccattctatgcttgaactgccaccatcatgtccttaacatctaatcatctttaccatctccttcatcctccacccctcctctagctctaggtctcatttttttattctaaaacacttatagacatttccttcaaagagcttcagtttgtaattagatattcctgcatgtgagtgttggaaatagcattgctgtccccacgtagcccataggctgcatgattgagggggcctatttgggctcagcactgcacttggcatgtgtcgggcattgtagaagtattggttgagtgaaggagccatggtctttgcacgttcttgtcattttcatcacccatggtctggtgagccaggcacaaagccactgaaacaaagcatccactgaggtttggtgtcctcagctttcccttgggtcggtgtgagctcccgcatcctgattcacactttctcagcccagtggttttcacatttttctgggttttatatcccatgtcagtaaaaatgtgaacctgagccccagccctaatatgtctaccttttagttacaggtgactcacatacacttcatgtaaatatgcatattgtgaaacataacaaaattaaaaagataagttaaaaaatattaaacgtctgagtatttttttcctgcaccagtctattgtctgggggccatccacttgggagaccacactcctccagtcaattgcctgtgttatttttaatttggttatgaaagttcatgccatgtaagaaatgcctgggccttatcaagctctccttccttattaagatcttcccaaccctggtgttgatgggtaggagtggagcgcattcctcacccttctttgataagcagggaaaatccgggtctgcccgagactcccagcaaatcaagtgtccgctgctgcctgtcagctgggtgctgcctggtcaggctgtgtgcacagacacacccaagctccctcaggtcgtctcttaagatccagtaaggctagcccctgggctactcctgcagatgcttggaaaggcccagaagtaatcaggtgagaggatcccatgggccgcggacttgggcgagtcagggaagggggaggaggtgctctcctattatcctgcaggctggaaatctgtcagaggcaggatctgtgcaggctagaagggcaggagttgatcaccacagggaaacctggagaagacaggcccgccggtgtttctatgggggcacttcagaaagttgtgctgagtctctacagtcagaagtggccagaagctctggatcggtggattctgctaccttttgccaagggcatgagtgagagagtgagtgagctgggagtggattgctgggggagagactcattctacataaccaactttcccctgagctattgcctcaccaacaggccgggtgctggggctgtggtgggagggtgaggggagcccactttcacctgtgagcacaacattaggaatgttctgtaagtatccgtgtagcaggtagaatttattgaatctcattatctgtgctctgggctgggggaggtggtacgcatatggggggagtgggttacagaaagctggcatttccagtttctgtagcagagttggggaggtatagctaacacggcacttaggcaggaggaaaggtgtgtggttggtaaggcagatttcaaccccagctgtgcatcagaacccaccaggggagcattttaagaaattcccaggctctacccaaccaccaagtcagtctcccaaggtggtgcccagtctctttttagaatgctctaaagtgagctctaaagcatggctgggtgccgccacattgagtcagggtgcagaacttcacagcaggtaggaagaagtaaaccaaatggatgtaagagagaggaaaatggagcaaggaaaacagcaaagaggaaagcaggtgcaggatttaacctgctggggtgctgggacccggttcttagcctgcccatccctgccctgccctggccacacagatttcacatgtgcccgcattcctgctcatcacatttgtgattttttgtttactggtatctcatgagtgctaagcgggatttattgagtaaggctggatttgatccatccttggtcttcagggaactgagaggctagtggatattttgtaaaaaggagggaacctaagggccatgcagtcaggggtattgggctgtgccaggaccccctgagccccatcacttgaggatatctggcaggtcacctttttgaacctcagctgcctgacctgtaaagtggtgactaacactaatacctgtttcccaggggctgttgtcaggatggagagaaataaggtttatcccaggtatggactgtggacagcccctgaagcttagtagattctgaccagcctaggcttgattgagctgttggaatggtgtagacagccctactgaggaaggcccttgctcactatctgagcttgtgtgtggcgggagtacttaggagggctcacttggagctgctcaggtgggtgggcgagggcaagaagggccccaggcttcttgttgaggtggagctggagcaacatcagccaagcacagaggtcccctgctctagcacccctgcccatcaggagttaggggctgtctgcctgtcttgctctgtaccagtagtaccacttgcctctcaactccctcctggctgcagaactctaggtctgcccctctcaagcctttgtctttcatccaaatggctcctgagaagtttcccccaggaagtcttccttgactcactagaataatgggaacaaattatgtccatcccaggtgatgtcaagatgtaagatcctgggacttccgggtcacacagtagtgttctctctcctgacactggggtcacctccttggagtgtgcatcatggcccctctttcccttggcttggtcagtgtctctttaatcccctcgccagagggcctcgctgagtgttcccagagcccaggacagctcccctgcagctgggtgcatcaggaaggctctgtaatgatgtcatgtggcctccagcctcccgcctggcggccagtgggaaggatctgtctgttctggcacaggggccgcttccatatggagggccaggaactggccatcacagtcaccggggcgttccttccattgctgcatgtttcccctcccctctggaagctctcaggcgtacccctgtgcaacccagggagagtgggcaggcgtggactggagtaaagctccccagctgtctgggaggcctgaagaaacctctgcagaggttggcctgctgccataatgagtggttctcctctgagctcccatctagcttgtggctctgttgcagacaagcctttgtgtgtcttggatgagagagctggtgtttttttacgctgaggtatggtttctgagtctggggaggcttctagtgtagggccctctgaggcctctgtttggggtgaggtacagcagtaggcatgggagaagaaatggaatgttggcttctcaaaagtgaggggtacttggttcagatacttggcctttgtagatgttcaggtatctttccctagttccagtggccagtgtggtcattgtcagaagtggccacccatgtgggtcagatgtgggaatggaaaagcacctgtgaggttgatgcatggccttagattccagggaggtctggatcctgctttgaggtgtccactatgcccaaaaccagacttatattgagtgcatgccttgctagccccaggagtcttaaaatggccacagatgtccctgatgagcagcagtgactggctagggcctgaggttaaccagagttaggagggtgatttctgcagatagaaaatactgcggaggatcattcatttttacacgttgattgaatgcctgccacgtggtgagttgtgttctgagcattctggatatagcagtgaacaggagaaggtcattatttgggctgcccctgtggggcttccattccatcaagggaaaccattaataagtcaatcaaaggcatgactgctggtgtgataggtctcatgaaacataaagctgtgttaaaagggactaggtggtccaggaaggcttctctgaggaggtggcatttgagcaaagactcgagtaacctacactagacttctggcacccatgagccaggacctgtagaggtacctaggaactctcttgctgaggagcaagctgaggcccagaaaggataagacttgaattcatgagctgattaattggaaagttgacctgaaacaaaagagtgacaaactgtaatgggccagtactccctgttttcaaccttaggcgtgtccccaggccaactgaccctctgccttttcgtcccagaatgtcctttattatcctcttgagacttagctttttaaagatttgtacttccaaattgtgtttattaacaatggtaggtttaccttctcatttgtggctgagtacgttgaggagagtggggagcagaaacacatctgtaaccgccagtcatccccccaggcaagggctcagcacctggaactggccttgttcctgtctcagcagagatgtggcccagtttgggtaaccacaggctctcgctgcctggcacagtgggatttccatctgtccttctgaaatagtttcttgactgctactttttgggttccatttggatccttcaggccctctcacctggtttgaggggccagatgctttgggtgagcaaaggagatcctgctgaaacctctgatgaagggtggtgaggccgggcttggaggccctagggcttattttaaggggagaaatccacagtcaggtcacaaatccagccatgacccacctctcccaaggaccgggatgagccttaattggctgagagttttcatctaaaagcaggcatcttgcatgaatatgaaaggagcttctgatgaagtaagacttcattaatcagcctgttaggaatctggcttcccagtattatgggggctggataatttgatgcttactgttgtgctttcagcttataaagggaaggcactagattttcatctttctgctaaatattgagagaaaatagtatctttatgtgctttgtttgtttttaactgttgagtatctgggtgccagacaccatatttattcttacttaatctgtatagaaagactacagaatgaatgggattattcccactttcgtagatgaggctcagaaagctagtgaagtgtctagctcaaggtcatatagtactgtggagcagtgctgggtacaaagccaggccactggcttcacaccttaactttgacctcttacctcctcccagccactttagggctgctgctaatatggaaataataacttcagactcctaactttcatttctttctcttctctgttaaaatctgctgcatttgttcccccaagaaagtgaaacagatgatactagaacttgtgacttttaaaactgttttattgtgaaatagaatacattgtaaatgtgaggttcagtgacttttctcctttagattttttttcccctttaaatgattcttttacactatcagggaaatcccagcaaaatcaactttccatatgcctgtcctgacctttctgtgccagggtcttaatatatgtgtgtctgggtttccactgacagctctaatatacttcaaacatgagggcttgtgcatgccaatgagaaagtacttaggatacctcaaagtgtgaaagagggtctggaaagtgggaggaagtccaaatcgtcctccaataaaagttgcctaagacaacttggggcttaggtgctacttcaaaaactaacaatgcattccacctttcccaaggggaagtgttgtgaatgggcatggcagtgccgtgtttcttgccctttgttgagcacctgctccaagccttgcttcatgctaggtttttggcaagcatcacatttgaatcctttagaatgcccctaggatacaggtgtgaccactccgttaccagatagagacacaggtccacagaggtcagatggccttcaggacacactgaacttgcccctgtgtgctgtagcagtcccttctgcttgtccatcccagactggacactttgggggctgaaggcaaggatacctttattgttggagcctggcgcagtgcctggcattcataggttctaagtcatagcattgaatggacggaggtgagttaacttgtccacataggtatagtggtgagcacattagattgtggaactccaggtctctatgactgttgcccagcaggtcagaagtggggtctgattctagctctttggttgaatgcaaaatggcatatgtgctggcttatggacattgcagcattgttatagcagaagactggaaataacccaaatactcatcaatcaggggctagttaagaaaaatggtggtgcatgtacaccatgaaacagtgcaaattagaaacaaggaaggtttttatgtactatatattacacaaacttcatgaaaaaaaaggtaaagaacaatatataatatactaatttgggataaaagagaaaataagattctaaatttgcttgtgtatgtgtaaacaaactctgggaggatttttaatgggtgggatagttaactggatagggtgggagagagaattaactgtatgttttcttaagttttttggttttgaaaccatgagaatgactgtattgcttattcaaaaagttaaaaagataaaaataatggaggtgaccttggactagctattctctgtatctgggcttcagtggattagatcaggccttcatctggagtggcatgttgtgtatctattgtgtatattgtgtctctctggctttcatgagctcttccggaagctgctgcccctgtcctaggatggtctgtagtcccttcttccattggtggcctgcacctgaatcatcagctcagagtgtttgagaaagactggggtgacccagagagccagaggccttctgcagaggtgtcaggccttgttcctgtctccaggcctgggactttatcctctgaacaccctgccctgatgtgactcaggtggttcttcccctaaagtgaaggattacagagactgttctggagcattctggcaaagtgtgctgcagtttaatgggaagaaagaaatggcagaatgttttcccaggttatttttaatgcttttcagttcagcaaacatttactgcgaactaagtgcaaggcagtgtgggggactctgagctacataacacctcctctgctctctggggcgccaagtttcgggtaagaaacttgttcgtaaaattcctccctgtgccctccaggacagcacggtttgcctctagtcccgcagagttttgtgggattggtaggaatccttctccccattttacagatgaggaaagtaagtctcagtgaagctttgcccaaagctgcagttcctaagtgttaaaacctggaaccgacaaaaaaagacacacacaaaaaaacctggaaccaaaccacactttctgatggtgtctcgtgtgcccagacacccatgagtaaaactttctgccaaaggatattccccaggggtgcaggcaaggcctgtttctacctggaaacattgggtgagcacagtcctgaataaagctccttttttcctttaaggaagggcaagagaaatcacaggcttatgcctgggtcttggatctgaacccctttgctgtggtccaaacagttctgacttccactgcttgtgaagcccatcactctggcaccaggtacatgattctagaacatcccataggtgtgtacaagtgcgtgtgacagacagtgggcttctccccatctcattctcacattatcactctgtttccttcccttccacaaattccgtcaccagtacccatcgtcctggctgatccccaaaaggaccaagcatgctgcctgctcagggtctttgccctcggtgttccctctgccctcttcacttggcttcaagtcctcactgaaagctcagcttagaaaggccttccccaggatcttttgtgaagtactgtcttttgtcacgatttcattttttcccctctgtccctttgttgcatttatatgtatcgtacatagatatctatacttactggcttattatctcttccccactagattgtaaacccacgggttaggtgcctgtttttgttcattgctgtttctgtttcctagcacaggtgcccagcttttgacagatactctgtaaacattgttgaatgaataaatcaggcctgtggcctaaacacataatgcttctttaaagagggaaagcatcaaatcatagcattttaagaggaggaaagatccaaggctcatctctttgcagggcttcatcatacaatattattaattcatttaataattgttcagtactgttcatgtggaaagttctttgcagaagtcactgagcagcctctgatgcatacacttacagggacaggggctcactgatttgtcagagcagcccattctttggtgggacaagctgcaaagatttgaacaccctcttatgttttatgttggtccaaaaactgcctatttgtaattcctgcacactgaccttagctcttgagctgctggagaacacagaataaatgtactctgtttgcatacagctctccttccaatagtcggagaaagatagctatcatgagttcccccaccctccagcctaaacatcactagttccttccattgttcttccagtgttacggtttgcagatgccttcctacccttggtgcctgcctcaagtttgttctgcttcgggtgtcagaatttaaggtctggacccatcagaacagtgttttgggaccctgaccgaggacgcttggtccatctcacttgtttctgtccacacagcctgtgttggccatcttggcagggatctccttcatgagcttttgatgaaggctaactaaaatctctaggctctttttttacattatgtctattcgtctagcccctccctgactcagcaagaatcgtaaaggtttgggggttttgttttgtctttgtttttagcatcttgagattaaagcagctgtagatctgtgaacagcaaagaatgcaacccgtgctcgatttcacaaaccagtaaatataggtaaagttctctcaccaactctggaagtacagaaaaacccactgagcctctaactttcttgcttctgccctctttttgatgcctgtgtccttttcacagagtctttctgtagcttactctccctcggtgttccgtccctctcccctccttccttcctggctctcattccattgccccgtttctcccttccagttagtagtgtatggaattaacattactccttagcatttcctgcacttccatccccagtacttttaccttcatttccagactatggcaagctgcacatcacatttctctaaggcagaaagagatgaaattgcttcttatgtgtgacccttggctaatttgttttgtggtcttggatagagaaaaaaaacttacagccctcagccttaggttcttttgcatgattggttcacatttctgcccaaatcagcggtttccagttggtggttggacacaagggcctcagcaccgcggtgtttgctctgcttctgtcattgccaatgctgctgtcattttggtagaggtggcagggaaggaggccaaggtcgagggtttcttctctgagccacttagcctttccccgcctcttctgccctcccagccctcctgggcagtgtggggaggcaggcaggaaggcgggagggctggggtcaggcccggggctcttttcctaacagctgtgttctttttcctcttttgtttcctcttgcttcaaggagttcaccgtggagaggcctgtcatgctggggtgtagaccccaagttaggaggattaagactggccccaggttaggttctacattgggctaaactgtgtgaccttgggtgaggagctggattgaatccagtggttccccagaggtggcgatgatggtgtcctttagtttctgaagcacatttctatagccagctggaaattcggcagaggcccgtactagcctgccagaagtgtcctgtcctgaatctgaatggcctggtgtctttttaaatgggctatgttgctaggctgggaaggggctgtgatctgctggctcatgatcgctacatggtgatgccacggaaattaattaacttttgttgtgcaaaccattcttccacttggtccatggggagtggatggctgtctccatccacaccagacccaccacagaaactctgagctatgtccccttttcacaccttgctgactcgactccggtaggatttccacaagtggtcccagcccagctgggcttaaatccctgaaattaatttcaggagtcaaaatcagccaaaaatcaggcagctgagacagagggccaggaagccattttcgcatctttttgtgtattttcccaagagtagagttggggtgctttgcttcaaaaatgaataaggggtcagagccattgctctccccaactccatcctttcttctagggtgagtgagctggttcagtttgaccacttagccagcccctctgggcagggcaccagaaggggataccaagatctcagaccttaccaaggccgtgtctgggggagagactgtgaggaaagactgacaggtgtcttgtggccaagcagcagctctctgggtgccctggtgggggacagggtgtgttccctggggagggatgggaggagtggaattccacttggctttgggttcaaggaagtgaggcctggggaagcacttcataaacgattaacacagggaggaaatgccaggtggtgtgaagtgtgtgctgccagtcacgggcaaaggggtggtgcaggaacaggcttgaaaagagacatggggatttagtcagggggcattgatggtcagggggctgggagtcctcctctggatttggcgcctgatccccatgccgtttaaaggcttttggacagagagcgactagacatgatgtgatgtgatcgaagcagtgttttaggaaggtggcccaggatgtaccctctccgctctctgggccttcctcatcaagctccttggggctcttctgttgtgtggggccaatgcggtggctcctagatcatcgtgggtggtgtgggtctttttatgaaccacaggatcatagagcagtcattaggaccccatgagtccacgtgcctactccctgctgtcctgtagggtgataggcatcacatggggcaaggccagatgcccatatttgaaaccagcaccttgagcacagggggctgtttttatgatcctggtgtgttttaagagactacatgattgactttcgcatttcggtaattatccgggataattgcccagcgtcctagatttcctttctagcatccttcaaccatgactcctgggctcctctggcctctgaagtcccccaccttctgttgaggaacataactgagtttggatgtgggacgggactaaaagtggatgggcccagtgaattttggaactaaaagggatctcgtgtctgtgctccattgtttagtgtgtggattagaggactgcagaagcccagagagtggatgttacttcccccagggcacactgcaagtcagtggcaaagtggggcccagagtccaggtcgttagactgcctgatgagcatcctttgcaccacacctccatgtttcttgtccccctttccccggccaccgttcagacaccacctgctggtaactgtgccttcactggactctgcttccacctcctgcttcttcacgccttccattacctgctgaaggtagcacaggacagccacttagaagcagcctgcttcacttgatcatgtcattcatgcaccagttccagaaccctcatctcttcctgtccccgttgcacttcctttcccccagacagccttctgggcctattctctgctgctctgggaatcttttacctgctcttaaatcaggcagggctagggcaggagctgggcaatcagggaaggcttcctggaggtggaactgccaagtgtctgaagtagaatagaatctagactggctggaagagaggaacgaggtttgaggggaggagagcaaaggcatgacatgagggaggggcccaagctctgccaggctcactggctaaacaggcccatctgacaagcccaaagcccaggtccgacagcaattgcaccagttcttgagttactgagtctgttctactggccagatgaagcatctgcagtggaaccagctcctctgtcttggtgaggcagaaaccaagtcctcctcaagcttgggggaggaggtaggaagccggttccaggcagcgagggagccagtcacagggtttatgttaatacgggccctcccccagccggcgcttagcctattacccgggccctgccgacagcttaattaccgctgcagcgagcctcggcctgccctccacggttccctaaaataataaggatggcgtcaccgacttcccgcggccatgtgctcccacccgtgccttcatagctctattgtgggaaacaaacaaaatccagagatccagatgcttttttcttggagattttttttggggagcagggttaaagtaaggtgggaccctgccccgtagttaagatttcaaaagatctctaataggtatggagacctgagtcttagctccactgaggttgcagaataacctcctgttagcagaaacgaaaaagctgtgtggttgattctgtggtcctccaccggggactgtgatttctgattagagcagtggtgtggtgctgtgcagtgtggtgtagcagagaatcacctatctcggggttcctgggctctaggccaactctggaccttgtttcttcctctagcaaaagagagctgaactagaccagcaatttgcacactgtgggtcacacttgttaaaaaatcatcttttttaatgtaatagaaaaaagtaattgtaacagggctaagttttgtttcagtgtgtatgcctgtttacatgcaaaaatgtgcttactgagccaaggtgtaaatgtatttatttttttgactgtgggctatggtcagagagccactgacctagatgatcccgaaggcctttctagctttcataatgtccagattttctcccagacttgttccctatggaacctgacaggatttttcagttttgccacactgactcctaagcaaaactagagattgtatggttaaaactacaaaaccacaagcatctatccctcctatcgaacacctgggaggaagcccatctccccctgcattggtgtctcagacagtttggccttcaagctagaaatgggatctgcaacaggggatggcccatttaaaaactgacctatttaaaacccatgagcactgaaaaaacacggggtcaatctgatttaagttgtcttcttttgcgaagctgggacctgaaagctaaattggtcggggactgacaaggttgaaaccaaagttacaaatatttattgcattcttgttcagtgaaagaaaagatcaagcctcaagtttagtggaaaaaactacacaaaaggaggtgtgggtgtaaagtccagcagggtgcattctgggcacaccatcttcactctccagaatgtggagaggccttcattccatgaagaagctctgcagacagcggaggtgactcagagctgtgggcctgccttggttcccattcttgtgccttgactgcagacgcagcagtgaaggtggctgtgcattgagaaggcaggtggctttttccaaggtgggggtgctctaagtgcactgtttaatttaatccaaccccaggtgatgggcactatggtcattggaggaagcggaagcttcagaggtgagatgagcttgcagtggggaatttgggcttgagccagatctgtctgactccagagcctgccttctgtccacctctccaccttgcctcagcaagtgctggaaaaataaaaagcagtcttctcttcagtttccttctctctggtgctggtcttccgagggctctgctttaggcccatgctgtccatttaaatcggggctagcgtcacgggcatgtgacctgtgcagtcacacaggcccacacctagcgggtccctccctgctcttgggtttaacatgctactgtccctgtcttggaattctttatcgtccttgagcaggtggtctcacatttgcattttgcactgggccctgcaagttacctgtccaactctggctttgctgtaaggcaccccttttcttggtctttctggggccctcctatctgcccggaacgttcccatcctccccaggtagaggcatgtgaagcacaccccccaccccagccttgggcctgctatctggcacactggactgtagttgtttaccagctgtctgtctctttcttgcctgccaccaccccacttgctggcaaggaccccaactgtggctcaccgtcacctctgtgtctcccctcagctgctcagatggacagtgtcacaggagctcactgtgtgaagagaggggtttctcacacacgagacctgtgtgcagagagcactgggtcaggtcaagaggaggacgcactgctgacctgcctccttatgggattatgcttgtctcagggacacagaacacaccagaagtagtagttgtttttgtttgtaaaaaagggagggcttgttcaacctgttttggaccagttgcactgaaagtttcactggtggtttgtctccctctgtatgctgggcacctaatgttgtggctggcacaataaagaggacatttgttaaggagttgatgggtgtccactccccgctaggctgattacagagaaggacagtccctgacctctaggaggatcggatgcttaatacatgattaaatgattcatgcagcagctgcccttggtgccccgggatgcgcagagctggctgcagaaggctttctggggagggggcttaactagagctaaaggcaggggtgagaggtggggtgtgaagagattggtggacatgagggcaggtggtcaagagtgaaagacctccttaggtccgtttgggaccttgatgatttttttcccccccggaggcaacaggaagccaggaatgttttctaggccagagtttgcactttataggttacacagataccatcgtcccctttctgtgaggcagatcctgagacctcggggagagagtcagggtcattcagccagccaggccttggcctccaggtcaaggcctgttccctctgtcatggagaccccatttggaagcagaggcagacctagggtgtcttagatgaccatgaccaagactgcagtgccggcagcagagaggaatggtcaaatttgagagatcagtaaagacgagatttcccagttttgaaacaagcgacgggttgttccttagaggatagtgtgttggtgtttatcacggacagttcagctccccttgatgagaaatggctgctgtgtccttgctttggggacacgttttgcaggaaatgccagagccaggcagtctgatctcttgggggctgagtacgaagatgcaggcacctctcaggtgtccacacttgagaaatgaagcatagggtcctgtgtaggtttgttgttgaggtgtttgaaaagctcccgacagaggcagaagaactccagttgtcggactagagagagagtaaccgcgtttggatatttttaaacggccagtggaattgggagagagtctaaaacccaaagtacaaattttcagtttaattttaactttgcacttagctcacacccagggtttggcagcggggaatgggccttacttttctttttttcttttttttcttttttaagcagaacacaccctggatgtaaaagggatgttctcttcacatggaagagtttggggcggcagcaccgagcagagaggggaggaagtgggttggaattgcagcaggatttcagagtcaatttaaggaagattggggtggttggatgttttgaaacacatgagcctggcttgggagctgtaagagagcatggccctgtgtggaggcaggtggagcagggggtggacagcagacttccacaggtcagctgttgcactggagttttttttttttttttttttttcttctatttgatccattacagacgcttcacaggctgcttacctgccatctccaatgtgacacatcaccccaaaaagcagcagtgggtttcctccgatgtggtgtgggctttctggtgatatcagcatcgttggggtgtaagcctcagcccatctctcccctccttgatctcttcccaaactgcgccaaaaccctgccaggaaggaagtgcagaaagcgtggtcatcctggaggccccacagacctgggagagccacccggcttttcagacaccaaaggctttccctcccaagtgatgagaggtggcctcttgctccttggggaggagcaggcagggtctcaggccccctggcccctctccagaactgccctccctctcagcagcgtcatcagagcttgggctgagctggttttgtgctttggttactgaggaagtgtaaccagggtggggatggctgggagtggcccccacttggctagtggaacagttagaagaggggctgaaggatgtgtaggtacagtcagggcagcttgttggattgaattgggggggtctggaaacaatgaggaacccctccttatcctgcaacacttactgccgccgggagtctgaacacaccctcctatgcccattcctgggactttaggaacactgagcccaatgtggctataaaatgggagaacaccccataataccccatggagcagtcgtgaggattggatgagatagtgcctgtgaagagggtgcctgctgagggcccaggaaagatcctgtggtagctgttactataaacagtaatggtggcttgcatgttgtccccgaggggagtggccaccactttgggcttggtgctgggagctgggactggaacctgtgtctgtctataggattctcaggcagcagcatgcctcttcaggaaagaggccgacatccgggaggaattcccttgactccgcagcaccacctttccttgttcctgaggccttctccttggctgatggccatagagaagctcttgacccgtctggaaaaaccacatgtctgaaatctttgagggtggactggaaacccttctcatatttttcttttatgaagcttaaagaattcccagggccttccaaggaaaggagtgactgaagacgcctagggcgcgtgactccagcagtgactgcgcacagagggggtggctccccctccttagtacagttgatctctctccacttgctctgctcccctaaggcctggcttcctggctctacactgatttcctgccctagggcaaaggcctcacaggatttattcccaggcactcttgccagtgaccttgagaaggtggcctgacctggacatctggcctctcctggggactgagagggtgggaaaggacataactaccccattccagatccaaggggaaggtggccctggcaccagtgcctaggccaagagcttgctagcttcctggcagattgctgctgtcccaggctgagcgggttacccctccaccagggaagaaagcagggcagctgtggggccctgtggccagatgcgccctgatgttccctggtctggtcactggtaagggtagactgaggagggcatggcaggcctgctgtggattctgttccccaagttggcccatggtcccgtgatgcccaaggaggagggcatcttggcagacagtcttcctgagcccttcaggaagaagctggtcagaccagcctgctcagaggcagggagcagccccagacagggactggttagaataggcctgtctacttatccgtgaggagaaaaggctatgaggggcaggaatgacaatgctattgagaaggacaggcctgtgccatgtgaccaggggtgagaaatgcaaaccggtgggtatgtgggcatcagtacatgtttcctagaggctgcaaggagcaggcaggtggggatactatgtcgagcaccaggtgccaccaggagggatcacctttaaggtccctgcaggccctggaagcccagggagcagcccccgatcagcttggaacaggagtggaaaactctggtcatccacctggagaagcgggcaccctggcctcccttgctgactcccctgggtcatttcaggcctgagacctgatgactcttcctcagccatctccacaccacctgtgctggagccaggacatgccttcagccaggtctgccttttaacagcgaatgagacggtagctctttatcagttctttctacctcattcgaaataaaggaggtagggcccagattgtaggtaagatgagaagaggggaatctaagaactcttaacagggcaaaatcacctccagggtggtggcgggggtgggagtggggtcatggcacgcgtggccacagaagtgcctccaaagaccaacttttggactttgccgacctgagcatttctctgcggggccatcctgggtttgtggacgttcattctccttccacctctactcttaggactctgcagagaaagtctagtgctgggatattattccatatggtagcttgtatgtgtctctttacacttacattaaataaatacagtgtaaaacttagctcctcagtctcacctcagtgactgcatgtggctagtcactcctcccttggacaggaagttctactgggcagtgctggtctagagaacagtgagtcagagagggtccctggtccgctgcccttgctctggggcaggccagtacagtgaccaggtgatgaatgcctgatggcaggggcaggtaagagcaagcatgcgggtgggtctcgggacccatctgaccgcagaaggtcacagacacacaggtgaaagggcagtgggggctgaggatgggaagaagtaggtccctggcttcaggaacatggccaggccgaggccacacggggcactgagatgagaggctctgacagaatgacagggcccagaggttgcctaacaacgtgatgtctggcatggtggggagctgggggttttattgttcaatggaatttggaagaatgtggcagttgggtcttgccgacagcagttgggtttatcgagtttgctttctccagtccagtcaggctcctggcgggggagtggggggacctcctggtttgcagctctgctcacgccagggacccccctccccacagtgttgctacaggcagaaagcctggggtgggctctggctctgccatgctctagaggtgccttctggtctgcctcctgtcccctccccggtcttgggccccattcctcaccccattcacgccggccttgtctttccaggtgaaagagctcgtcctggacaattgtcggtcaaatgaaggcaagattgaaggcctcacagatgaatttgaagaactggagttcttgagtacaatcaatgtaggcctcacctcagtcgcaaacttaccaaagttaaacaaacttaagaaggtaaatagagcgcaggaggggctatgcccgggaggcctgccagttccccgagcctgtgtgcgggagccaggcccttgagcccagggccttcgttattgtaagagctctttttgctttttctctccctgccccgtttagcttgaactaagtgataacagaatctcagggggcctggaagtattggcagaaaagtgtccgaacctcacacatctaaatttaagtggcaacaaaattaaagacctcagcacagtagagccactggtgagtcactggggttctctcctctgtactggggtgggagggattgatgttggggaatgctgcctttgatttgtataacatgctggcgggtgggaggggatggcttatctcactttatttgactgtcattatatgctgtgagatggagttggagctcctacttctgctttgtccatgaagaagctgaggcctagagacgttaaagagcttgaccaaggtcaaacggtcagaacaggcatcagggtgaaggaaaccctaagtcccaggtctcggcttccagtccagcacttttcctcttgagcgtttctgcccagccttggaaacccgagctgtcatttcttcaggcttagagcacggcttgtgcccttcactggggaggggggaaccacccaggaattaagcttaccctggaggtggcgacctgttttctccatgggtcactagccagaggctactgcctctagattgtggcaggtggtcctgacacaggcccctgggatgacagagagctgtgtggcatgggagtcccatgtaggctttcctctgtgagcacagagcagagtggctccgggtcatcagtcctgagtgtgatggtgaccagggcctcagagccctgggcggtttcttcttctgctcgttcacatacagctgagcataccctaaactttatgattcactagccagaaaggggtaggtcatggtcagaatagcaatttctccattatcctggtctgagtgaatgtattcttttgagttcaaggaaatcaactgtaaggtgtgtcattgattaatgatagcttttttgaaatatagaagtactactgcattacattaacacattgtaaatatgaatttgttcataagccatgcaccttagaatcagggaaaggccatgaggatatttggccaagttggccatgtttttcttttctgggtagatagggtggcagttggggcatctctcagggtttttgtgcaaaaagcattccttgccctccacagaagctcagggttcaggttcatgggccagcatggcagaaccggaagcagacatttctcttccaaactcagactttacctgcccttgaccaggtctcagtcacagactcttaagagagcaacctagttcctgacactgaccataagagacagtaactttaatcaccagtcaggcctggccccgttggaacagggacttggcctggggcagggtacctgtgtcttgaggggaatcaagatgtagctgttccttgttagctgtgtgaccctttcacttcctaggcctcagattccagccaccaaacaggtgtaaggtgtagtatgggctgaaactaatcggtaaaaagctttgcacaaagcaaatcatgttaagaactactgacaaaatctgaagacttcatttcctcttgtcctttttgaaagtcggtgttggaagagtaaaagcacaggtctgaggttgggctgcctgatccaatcccaattctctgctctcttcttcctcatctataacatgaactgataattatttctgccttattggggctataaggataaattgagttaataaagtgctatattaattgccgttattacttttattcacagaaggagttagttatgttcctgtgcccttctcagttcccctctggcaccttagtcacaggagcaggcagcaaagcttttggcaccaagagagcccggtttatttcaagcccgccactgttacggcaaaagctgtcattgccaaacaaaagaacgaggtcttgcagatccttaagtccaaccccccatcttccagataaggaacatgaacccccccccctccgccgcaaaccaggggtctcatggctgagcaaagccagagtttgcttgtcacctgcgggcgggaagctctgcacacctctcgtgtcacccccaactgatccccctgccactgtccactctgtttgcttgcagaaaaagttagaaaacctcaagagcttagaccttttcaattgcgaggtgaccaacctgaatgactaccgagaaaacgtgttcaagctccttccacagctcacgtatctcgatggctacgaccgggacgacaaggaggcctctgactcagacgctgagggctacgtggagggcctggacgacgacgaggaggatgaggatg

SEQ ID NO: 4 - DNA, 26343 bp, Sus scrofa
caccgcggctgccgagccgagcggcgccgcgcggggccgagtcgagccgagcagccacccgcgccgcgtcgccggtttaagcgcagtgcggagccgcggccgggggcggcggtagtgagaccagcgctgcgctccagcccccttttccctccatggtttctctccgctcccgtgagtaacttggctccgggggctccgctctcctgcccgcacgccgccagccgccccggaccgcgccgccggcctctgcctcgagcagaccccttccgacggccctcgctgcgcaggctgggagcctctcccccctccgcccccgttgcggaaagttaagtttgaagaggggggaagagggaaacatggacatgaagaagagaatccacctggagctgaggaaccggaccccggcagctgtaagcagaatccccttcgggctccctctccccccgatgacttgcatgtaatggtggccacctgcggggtcccagacgcgggctcgccgaccccggcgcgggcaagagcgcagctcgcgggctcggacgggaaaggcgggcgggcaggcgggcgggcgcggaggggggagcgagcgcgcgggattaactctttggcgcccgcgggcccctgcggccgtccagggaaggcggtggggtgggggaaagcaaactttgagctcttcgcccgccggggtcctttcccgaaggagcgcgtgtgcgtgtggccggcggcaagagagggaggagggggttgtgtaacgctgggagccatgtttgcagcctcccgagatgcgcggccgggcggaggccgggcctacggaggagccgcgctgccagtccggactgggcccgctgcgggccaggccggcctccgcgtgcccccggccggcccgggagggggctcgggcggagcaggaggctcctccagccaggtctcgcggttggcgccggtccggccaggacgggagcggaaggacgaacagagggttctttgcctccaagggggacaggaagccccctcgggcgccggggggcttgggcgggcgcggcctggcgcgcgcgagctggggaggggcgagcccgggtggcggaggtggcgcaaccgacgcccctcccgaggccaagtttgaaaaaaggagtcggttcccgccatttttcaagcctaaaaataaaactttgtctacctatctctcgcgcccctttcgacccccaggccttccccagtcccggtctccaaatgcaggccgcgctcggcccgagctagcagttgtggcgtaagcggcttctccctcccccccgcgccgcggcggcggagcccgggggcccctgcccgggaggttggcccctcggtgtgggcgggcggcggctcctcgcgtcagcccaggcgcgccacaggccgacgcagcgccatgttggcgggcacccgtctccttccgccgcgtgagtcggcctgcgggctctgtccgtccggccctgcccgcccgcaccggcggtggctctgagccgccgctcccttggccgagcctgcggtttgtttggcgcgggcctcgccagggctcggctcgcactggcgggagccgagcgctccggccgtcgccgactcatctttcgggcgcgctgccgccccctccccccttcttaaaagggcaacggcaggcggccgcctccgcccctagtcgcgggtacagacgggcctcggctgtgcttgcttgccgggcgggcgctgccccgcacgtgcttcagagccgcagatccaggccggtgctcgcctgccgcggctccgtgagtcgctggtgggccttgaagagtcacgtctttattctctaccccgccctccccgcgaagtagagcggcttcccgcggcagggcgcggggccatgtttcctggcgccagcgctgggaggccgcgcctccgccagaacccctccgcgggtgagtggcgtcccctggcagaggggcggcccggggaaagccctcaccaccccctcccgcccctgcgccccacactggagacgggcgcgtttcgggcagtcaggtagcgttgggtaacaagttgccaacttgtgggaattcgtcaagcaggctttccctggtgtgccaggggttttaaatctctgaggtccccacaaatgaggtgcggccctgctgcatctggtgttcccacctctccctggaagacctctggtggtgggcgtctcgactctgtcccctgagttttaaggttgagatttgaccgcggtcgtcccttccgtccatcagtcagacattttgtgtcggccacgtgctagtacattgaacctttaagcctcttcacactgaaacttgcaacctaattttgagaagagttaagacatttgaattattactgctcaggtccaaatcaggtgaacgtgagtaattaaatttacccgagtttccaaaaagaaaaatacgtatatggttctttaaagtgccttaagatctgggatttggattttagcaatgtgtgtagaacagtattaaaatactcggctaagggctctgtggctccctctgagaagaaatacaactgagctggtggtgtatatggaattttttcgcacatgaaataactaatactgatttttaaaatgcatatttatgtgcgttgggccttttattttttttcccatgaaatcaacttaagccttacccttttgccaaaacagtttttagtcatgtggctttttaaattaaaaggtcattttgccagttgcactattcacatttcaagtactcagaagtcccaaatgattaggggctgctgtattggacagtactgctctacagtaattcactggttttattaaataaatatttgccaacagcatgccagggcctggaaaaacagtgaggcagagcgcagccccttccattctgaagcctcagtaaccggtggtgcctgttgcctaggtgcaagttaggggccttgggagagtgtcataggagccagccaagattgtgggggcaaagggtcccctagggactgtaacagggagactgaaaacagtaagagaggttcttaggagaggaaagccttgaccttcaactgattgggggggggtgctgtaggtttaaaggaaatttttttttttttgtctttttgccatttcttgagcagctcctgtggcatatggaggttcccaggctaggggtcgaatcggagctgtagccaccggcctacgccagagccacagcaacgtgggatccgagccgcgtctgcaacctacaccacagctcatggcaacgccggatcgttaacccactgagcaagtgcagggaccgaacccgaaacctcatggttcctagtcaggttcgttaaccactgcgccacgacgggaactccggtttaaaggaaattttaaaagaagagtttaaaatttttagcacaaaagcatcatctttaaggtaagtgagaggttccaagatgattctaagtcagcaagtcttatgggtttgttgtggcgcgagactggggaaaggggaagaaccctctctccattgaatgtattggtataacacaacgaaatgcacaacagtgtattccagatgtcatcaagtggaatagaagactacttgagagtaagtggaggcttgatcataaatgttttaagaccagataggcttttgagtatggctttttttttaatttttttatttgggggtttgaagaagaccctggtaacagtttaccttgtaagtccaaaacacctttatatcagaagtgtcttttcatagtggaaaaagtggcttaagatggcatttttttttaatttcattttttattttttttaatttttcatcataattttttttttttattttcccactgtacagcaagggggtcaggttatccttacatgtatagattacaattacagtttttccccctaagatggcattttaacatatctttgaaaagaataatgatcagtgaaaatataggcaaggagaggaaaatttttatacaaaatattagtattaatttcactgagagcaaattgtatagtgccagaaaagtaccactgatattgattcacatattggtggtggtatcagatgtgaagagacatgcaatatcaagacgtaaaccaaatttagatatattccataattggaaaaaacacctgttcattatatgaggccctcatctttctatttttccaaaacatggcactgttattaactatggatctgggaacatctgtccttcagtcttatgttcaaaggatagaaagccatgcagttcctgtggcttgtaatctatgcccctgtgaaacactgtatgcttgactgagacatttcatatcccacaaataatagtttttctcctaggcccaatttactggagaattaagggttttcttacattacaggttttcattatgtatttttaaatccccactcccccacttttggcatttattgttgtgtctgttgtgattttgagctcaatgggatattctaattggttgcaatagccgctaattggggttatttccttatgtaagtagtgcctcttcattgaggataaattagatgcagataagcaaaacaatagtagatataaataagaaaaatttaaagaacctgaaaatctcacacacacccatcctaccatgtagatattctggtgtagagtccacgagaatgtttaattttttccgaactcaaattatactgttaatgcatatactatctcgttgctaatatagtagtaaacatctttatcttctatggcacaatttattattttacagtctcattgttaatgtctatacagatcatgtaaccattcacattaagtgaccagaaggatttttgcttttttaaatagtactgaaatgaacatttctacctatcagtaggatatgggtgtttccttccttcatgacacccaaacacatttgagaactactaattgtaaattctgttgtcattttgaaaacgtacttttaaaataatagtagggtggaagagtttaagattggttaactcatgaggctggaaattgtcaaaggtggcaggagttactttccacatttttgtttttttttgttttgttttttgttttgtctttttgtctttctagggccacacccgaggcatatgtaggttcccaggctaagggtccaatctggagctgtagccgctggcctgcgccataggcatagccatgccagatctgagtcacatctgtgacctacaccacagctcacagtaacgctggatccttaagccactgagcaaggccagggattgaacccacaacctcatggttcctattcggattcatttctgctgcaccatgacaggagttccactttccacattattggattatttcacttactgcaataatcatgtattttctaactaaaagaattgataatgacctttacgcctccatatctttttttccctcttataacaaattataactgataaatggggaaggtcactcaagcaggtagggaaaattgatttttttttcccctagactaactaggggaataggaaatgagagcatattggagaggatgaaaagaaaatttcttgatctcctgcggctactagctccaatccccgtaacttggctacagtaaatttcaaagttttcactgactagttgtgagtgcatcagctttgctgatggctatagaaaacaaaaaaattggataggaaatgttttggaattttgtttttagctcttaaatgtttacttaaattcatatttgacaaaaagctagtttagttgggaaaacgggggatcaagaagagtaaatttggcccccagtattagtctatccagttactactttggatcaaatagctccctaagttgaatgcacaaatagagaaatacctgcccaaccttccagtattacatggtagccttgagaggatttgggacatgaggaagaaagagtagggtgtttttccttgattagaaccttctgtttatttggggtctaattaggaggccatgacactatctctgccccgcatgctccaagcacctcccttgttaaggcagtctagattccttcacactccaggaagcaaattggggagagggagggtttaattatctcatgctgctgtcatggtgcctaaatacagacaccttttcaccagggtcctatttagattttggtctttttagggctcggatcccaagttgctgtggcataggctggaggctgcagctccgattcgacccctggcctgggaacctccatgtggtgtaggagtggtcctagaaaaggcaaaaaaaaagtaaataaataaataaaattaatcttttgcagttcctattgtggcacggtgcagttgaatctgactagaaactgtgaagttgcgggttcgatgcctagcctagctcggtgggataaggattggacgttgccccgagctgtggtgtaggtcggcagctgtggctctgattaacccgtcctgggaacctccatatgccgcaggtgtggccctaaaaaagaaaaaaaaaataaataaaatgagtctcacataaaaagacagcatgacattatttatgagaaacgtgttcaacagagaagattataacctctggtacatccatatgcttagaatttctttagtcgttaagaaatatttagagttgttaaaagcatattaagtaatattgcttcatcttgctaagactaaaaaaaataccaaaatagtaagtgacaaacagtaaatgctttgcattaattgattatatttaggatcagacggtagattctcttcatatccaagtttcccctggttcatcatctgctcagtcccctgcagtcctgattgatgtaaacctctatgccatttttttcttcatttgacagttgtgaaggcttttttttttctcagcttgcacccatggaaggaacaaacccaagtcacagcagtgaccatgctgagtccttccttaacccctaggccaccaggcaactcctgaaggctttttctcatattgagatatggtgataactaaaacagatatgaccttaccatgaagcagtgactcctccacccctacacctgtgacacatggaagtccccagtccagggatccaatctgagctatacctgggaaacaccaggtttttaacccactgcacctggctgaggatcaaacccgcactgccctgaggcaatactggatactaaaccagtggcaccacagcaggaactccttagcagtgacctttttaaaaatagatcaatattcttattattgaaatgtttaaataaggttatggaggagttcccttatggtgcaggaggttaaggatccattgccactgcagtggcttgggtctctgctgtggtgtggccacacacacaaaagttgtggaagtctcccagccagtcaactttccctgaggagaattcttgagaagactataagaaagcaagtgtgtgaaatgttacataagggataacgcattatatattctctaccatttttgtcccacagcatatcctggaaattagtccctccttgatggacaattaaattgccttctaattttctcagttcttttttttccagttacttcttatgtcttatttataagcctttcggagtgttgaaactaatgggtcacctttgggtactacaaacccaattctaattggtactaagaccaattcttcttaagtctcctttgcaggatcccccagggttccatccttggttctcttcctaggaattccatccttctactttttattgcttctgccctgacttccaaatacagaacttaaaccgaggactcccctgaactccagacctgcatgtctagctgactggggatactttcatctggatatcccatggaaacaaacttggtatcttttgtagtagtcattacatatctgcctctctcccaaaaagaagccactccttcctatttccatctagctacatagtccccatttctcaaacgaacctcagttctttatcatcttttgtaccccacagttaaacttgcagattttgaccactttaacttttttcccctcccagtttctgttatttggttcagcaaacttaattctctcatatttgaatgttttatggtagtctttttttgggctatgccacggcatgtggaagttccccgtccatagattgaacccacacctgagccactacagtgacgttgctgaatccttaacccacttcgccgcaagggaactccagctttatggtagtctttgatgaccttagttaaagcagaattttgtcagttgagaacaatgtccaagagttgatttcacagtggactcgaggtataatgtttaaactcctctgtggcttttgacatattggtgtcatcttgtataatatttttgaattctctgtcagataatagttgtagaaaatctaccaaatgaaatggaaatgtttagctgtattgcaatactacttaggtgagtggtgattacagtggccttttttttttttttaatgattagttggttttagggttttttttgttttttgttttcttttgagggccacacccccagtgaaatatgttagttcacaggctaggggtctaatcagagctgcagctgctggcccatgccacagcacctagggatctgagccacatctttgacctacaccacagcttacagcaatgccagatcctttaacccattgagtgggtccagggatcaaaacctgagtcttcctggatactggtcaggtttgtgacccactgagccacaatgggaactcctgttggaaagcttgcctggaggttacttcctcttttatttttttggccaccctgcagcacatggagttcccaggccagagatcaaatcctagccacagttgcaactttaaccctctgtgcctggccagggatcaaacctccttcccaagaggctgttgagtcctgttgagccacagcaggaattccagtttgtttgtttgtttgtttttctttctttttttttaccttagggctgcaccgtggcatgtggaggttcccaggtactaggggtcaacttggacctgcagctgccattctgtgccacaaccacagcaactccggatctgagcctcatctgtgatctacaccacaggtcacagcgtgtttgtttgttttttaatacacaagaagtacaaagagttcccattgtggctcagctacctaaaaacgcaattggtatccacgaggatgcaggtttgatccttggcctacctcagtggcttaaggatctgtcattgtcacaagctgtggcataggtcacagatgatgcagcttggatctggcgtggctgtggtgtgggctgacagctgtagctcccactccacccctatcctgtgaacttcatatgccacaagtgcagcccgaaaaaggaaaaaaaaaaaaaaaaaaaaagaggaatacatgcttagtacagataggaataaattgcaacgatccttgtcattctccttcacccttgcccagaggttactttctcagcatttactctgtcccaagcctactttctacagaagttccacttcacagatgaggaaactgaggcacagagaagttaaataacttgcccaaggtcacacaggttgtaagtgacaaagcagatagaatggaacctgtatgcgtcctgaaagcaggacgcagacaggggagtgagaagtgctgaagaagcaagtgagaagttgtggtgttatcggtgaatctctaaatctgtttgcttctctaactggggggagggtatggtggtacaaagaataatgagtaaattctccatagatgatagcaattactagagcagtatccttggactttgtatgagaggatgaagatgttactacctcctgttttcattttaaaactgtcagcaagcatctccttcccttatacatgcttgattaatgctattaaatgtgttagattcactgcaagaatgcctttggcagttaaaactaatttgcatcagtgtaaatttatcaaaacgtgtttaaaacttgcaagcttcagagtcagccacagagcaagaacagcagtagagactatcatggtagatagtcacacagtagactgtttattagataatcagtattcaaaattctcagatatacttttggatggatttgaattctgaatattaagatctccaaagaaggagattttatggcctaaaaagaacctaatatctaacagtttgcccccccagaaatagctttctcacatgtaacacagaatgatctttgaattaagacctcctgtgtcttgatcttttcctaatatcaagataatctaagtaaaaattaataaaaccacaagtggaaatgtgtagctgagaaacctgtagccaaaatctcttagtgatcttgatgggagaagtaaagctttcctcttttctttgtgtcagtctcctgcgccttgagctaggcttggcctaaaagggttgctggggagagtggtttgggaagggataatcttcactctgcatttgtagttaaagctactccttggggaagagacttaggaaaaagaataaggggggtgtcatttcttcacttacatcctaaggactatagtttctgtctctggaaagtaaagaatttaaatctttgttgtacatggtgtgacatcccacccttgatatctatcagaatattgttactaaaggcttaatcgtttttcctttatttatagctgagccaggtctaagtagagcctgcccctatatggttggagtttttgctttgttctttgttttctatatggttttgaaagcttgtctcctcctctttgtcacccacaggttcgagaacttgtgctggataattgcaaatcaagtgatgggaaaattgagggcttaacagctgaatttgtgaacttagagttcctcagtttaataaatgtagggttgatttcagtttcaaatctccccaaactacctaaattgaaaaaggtaagtgctttttctttaacagtaaaagagagaaccattctggggaaggggaaaatatatgattctatctgtaaggaagcatttagtgtagcagaaagcgcatggcctttggaactgggcagatcagggattgaattccagctctatcatttccctgatgggtgatcttctgcatgttacttaatctctccaaggctcaatttcctcacctgtaaactggtgataccacctgaccttccagaatggctgtggtgtttgaaagtagtgcatgttgaatgctcaataaataaatagtggttatgaagaataattgttagggatttattgtaatgtcagctacttttgttcttaatatgctctggcttaggaatcacaggtgcctcccactcttcatgtttttttgttaaggccaagtttaagtaaaggcttttcaaatttgtactccatggtatttcaaactcagtatataattgttatttttgctttttagggccacacccacggcacatggaggttcccaggctaggggtcaaatcggagctgtagccacgagcctataccatagccaggacaatgccagatccttaacccacagagcaaggccagggatcgaacctgcatcctcatggatgctagtcagattcgtttctgctgagccacagtgggaactccccattatgtaattcttaatgactggtaagtttaaaatgtgatttactccaagagttcattttaacaacattgctgtatttccctgtcctacttgatagctcattgttagtgctttattggtctaattataatcaatcattgtcaccttcaacctccccctcacccaaaaaacatgtttttttcatgtccttgcacatttacctgtcacagagcccccagtatgtcagaagtggaagaaacttatatcttgtggcctcggcctttgttttataggcacagtagtagatccagaaaggtatggtaatttgcctaaagccactcacgaaagtggttagtagtagagccagaattagagctcatatcttctatttgctaacccagtaccttttccattggcagtgttgcagaattctccactgtttacctcatctctgtatcagggagtttgagctgaacctttaatctaaaaaagatacgcatagaaatctgaagtcaaatttaggccaaagacaagtaagctgttcctatagcctgcctgcttgaatcccgagagggacttttttttggttaagtatatgaattaaaaatcaggagtgggagttcccatcatgacgaagcggaaacaaatccgactaggaaccatgaggttgcgggttccatccctggcctctgtcagtggattaaggatctggcgttgccgtgagctgtggtgtatgttgcagatgaacctccatgtgccgtgggtatggccctaaaaagcaaaaaaaaaaaaagaaaaaagaaacaggttctgggagaaattttggtgtgtaaatgtcacaagtttcctaaatttaaacattgatttcatttcaaaataaatatgccactaaatgctttggcaaactgccttgctgtccctactccttaagatatttgtgttgaaaggatatgaatattatacgtatcgatattctaacaaccaagagaaatggtctctattttgaatttctaaaacctgtgtaaagctaataacacttgtgtctttgttggtatagagatgtattttaaaatctagaccacagttagatcttttattggactatcccattggaaggaaaaaaaagttttgaactactgcattttttctcttctgaaatacttaaaaacaaccaagcagcagacttactttttttgttgttgttggttttttgtttgctttttttagggctacacctgcaccatatagaagttcgcaggctagggactgaatcagagctgcagctgccgacctacgtacgccacagcaacacctgatctgagtcacatctgtgacctacgctgtagctcttggcaatcaatgccagatccttaacccagtgagtgatgccagagattgaacccacatcctcatggatactagttgggttcttaacctgctgagccacaacaggaactcccagatttactgttttttaaactcattctttcaacaaatattttaatttttagaagttcctctgcatcatgtagttcatttcattgcatgcccaactaaatcatgtaagttttcatgccatttatcactgtaacagctatgtaatcttgggcacttacataatctcaatagttcattttccttttctgtaaataggggtgataattctacttgctccgtaggatttactgtgagatcagatgagttcatgtatttctagtgctttgaatagtgccttaagcacttgggtacttagtacttaagtactgtgtaaaggttagatacggttactgttgttgttggcacttaaaattgaaactagctatatggccttagttttcgtatctgcaaaatgaagagtttgaattagatgctcttaaccatcttatttttccacgcttcagtttcttttactcttaagattcacatattccttggtgaaggttcgttccttcattgacagaccagttgccgtgctgcttgatcggcagctaagaaattagagtaggttcttaaaaaggcttcttgccaagtttgtgcaaaaagtatcctctgaggagttggttttgtcagctttgaacctattgccccactcccttttctgaggtaatggagcttctttaaaggcttgtaccattcccatagctttcagggcagcatttctggtagcttccagatgtagaaccccatggcaagtcagcactgtacagaaccagattaggtttcaagtgggcattgtgagctttgcttggcacacagaacaagctgcttagaatgcacagaccatttacccttcttggcaggtatcgaatattacaacttctcaaagaattctaatttgctttgacccactttttaggttagaaaatgtattcactgatattagggaccagcaaagtgttctaattagcagctggttaagaaaacacaactcttttcattcaaattgtctctccttccccaaagtgttctggggatctgtaaacttatttgggtttaatgaaacaaaatgagcatatgtgccctaataaaaaatagagatcatttgatcttggttggtgtttaagaactatattggttacttctaacaccttaatgatatgtgtttctttttgtgtttgtgtgccgtgtgcatttttccctttaacagcttgagctcagtgacaatagaatctatggaggtctggatatgttagcagaaaaacttccaaatctcacacatctaaacttaagtggaaataaactgaaagatatcagcaccctggaacctttggtaagtagttgagaatttggaaaacaggactttctggtcattttcattttcatatttctttatggtgagggaaataattgaaagttataatggagaaagtggtgatttttttatagtaaactttttatagaaagagtccagttttaaagatcagagcctcactagttatgtgttcctgtggcattactctccctttctgattattatggtggcttccttcaaaatgcttttcttttgtcctttttaaatgtcatattgactatagccttaaacatccatcttcaaattttttccccagactggccaggctgttctgtacttttgtacttttccaaaaaggctgtttatgttgggtggcatatctgactgtagaaggtaccatccaagggcagctccagtgagttttaggccttttaattcatgatcttgtgctctagctggatcattgttgcctaaagttttgcatgggaacccctaaattctcctcttagtcctggaataagctgtggaaggttaagtttaagtgctacttgggttacagacttgctgtgtgaccttgggcaaattgcttcttctctctgggcctcagtttcctcacttatgaagcagaaaggataatcctgccttacttcttaggaattctgagagtaaaataggtatttatttaccttgctttgtaagttgggaagctaagctaattgggggtttagtccatgtggaagttacaagtggccagaaaagagcttcagaaggcaagggttcatgcagagtagggggctttggctgccacctgaaaattccgtgatttcaagattgttaaatgacttttccccctaaatatgacattcttgtctattttaataaggctaatgaaactcagatttgttttataaccgcccaaagaagttttgtggcttctttctgggtttttgtttgtttttctgttgtacataaagtcagtatttccatctgatttaacttgcagacattaattggaagagaggctacacagtggataagagctgtctttcaggatccagcagagtagaacccaagagtatgagacatccttctgctatctctatcttttctggtgtcacaatatatttaaatatttggatttcattcacttacacagaatgctttattgatatttcgagggaagataatgtagggtcagataattgagactcctccaatatagatttaatccccatttactaagtccctttacatttcattaagtggatcacattgagctcatttctcattaagtgttgggagcagcctgttgattacctttgctccatgaattttgccccttttttcctgttaaactcagatacttgagggcaccctatttttttaaaattagttttcctccaaatcaatccccatttccaatgttaaagcaaacatttattgtgttttgctttattcagggacattaacatctgcccattgtatcctcatatgatgcagagaagagaaactgtcctgttagaaaggaggaaaccaagtttaagccgcaggataaatggcaagtagggattcaaatccaagtccatcattctttgcactgcccttgggacctgtcttttcttttaatttacacgttttttttcctacccaaattgacctaagctgggagttagaacaggagcactaaattaagtgcttaggctctcccagtcagatgggctgcataaaagcctttgtttgtgttaatgacgagtctatcaatttagggtcatagaaaacttaggaatcccttttctctagaacagagtaccaggcagtacctttccttgctaggtcactggccattgcctaatctcatggcaaccctagtcatctttgatttttttcttggaggcttttgtcaatgtcctaacattcagaggcagagcagaagcaaatgttgtgtgggagttgtttgcatgggtgtttctgacctgggcggtgatgtggttagggccctttggtggatatgaaagtctgaatccccttggacagtgaaatatgagaaataatcatttaaatatttaccatttgcagaggatctgctttgtacgatacaccaaagtggatgctttatgtgtgttgttcataatcctcaacatttctccagagtggagagacatagcatggcccacgttttacacatgaggaagctgaggcttaggagaggttgaatcccttgtccagagtcacacacctggcaggccagtgacagagccacagtgccacacacccagggctatctgggaaagcctgagtgcctgccattcttctgaacttgctgttcagattcctggatgtactaggtgggtctcctgaagttacaacttaaggataaataaaactgtaggagaaagtgtgggggcgggggaaatgttgggtccattttgacttctgaaagtattcttcagttgtgaaaaacaccatcctcatcctcatcaaccacatacattttgaacaccgtctactttgagcccagttcttacagtcaatgcaatgattgtgaatgcctctgcttactacagggacattaatcgagagacaaagaaggcatcaattcaaacttccttggacaccttttttaagagacctgggccatccaaaccatcccccaaagcccttctaaattctaagaaggcaagcaaaattattgttaataaaatgtttaatgtttattatggatagcctattagttttaggccaaatttctgagatggtagagttgtgaattttttttctttctttttttttaaagccgtatttacacattacattgggatcctgaatatctgtgtgtagtgtattttggacctttaaagcacagttttactgctctaaacaattttagagttctaccattattaggagttttgttgatgtttatttggtttcactttgttttctagcatattgtttggcatgtctgaattattcatatgggtcctttctaaagaagtggccaaaaatgtcacggattcagagtttcagaaacaggaggccctgtgttaggctagtcaatagagttagaaaatgtgcttggggcactgttgagcattaagatcaggggttgtatgcatttttttgtacatccattcctagggaataatattgaacagtaaatggctgcttcctttaagtgaagaatttatactgagcctctgtggggaaagctgcctaaatttacttgtggttctatattagctgttacagagtcaacccttttgtgaaaagagttccccagttgtctggggtgctatttcaacattttttccccctctttggcaagaacgcattcctgggcttccggagttcagggactgtctagtaggaacctaatctgaaagctgcatgtcataaaagcgtttctccctgtgagccctagggctggggacaactatcttaaagaaagacctcaggggactgatttacataagcacattattggatcagcgacctcttggatcagtgtacgtggctgttttgaggagtacatttgcctgttgctcttaactctgttctgggtctgtgctcccaagggctgttcagtgagaataaaatcaatgtgggcacctctttgatgaagaaaatgaaggtttgtgagtgcaggagtcagcaaccctttgctctcaaggaccagatagtagaccacctaggttttgtaggccttagtctttgttacagccactccactttgcccttatagctcaagagaagccacacaaagttcctaaacaagtgagtgtggctgtgttccagtgaaagttagtttacaaacacgagaggcgggcaggatgggccagcacagtttgccaagccctgctttaaagcagagattttgacatcattttgtaactcccaagaattatacagacaccgtagatcctgaagacaaggttttgtttcatctatatctcttcccaggcccttgtgaatattgaaatagatttccaatgaagtatcaaaatccttaaacatcaacatttattttctgcaacttacttcatgaagagatcctcttaatatttttttagagaatggtaaatcttttgattcaaaacctttaaatgctaaatttgtgggagttcctgttgtggttcagcaggtttggaacccagcacagtgtctgtgaggatgtcagtttgatccctgggctcattcagtggattaaggattcagcagtgctgcaggctgtggtgtagtcacagatgcagctcaaattcagtgttgctgttgctgtggtgtagaccacagctgctgctcctattcagctcctcacccgggaacttccatatgctacaggagcagctttaaaaagaaaaaataaataaaggttaaacgtaggaagccatatatccatatgcccccaggcccccctcttttgctttttagggccacacctataacatatggaagttcccaggctaggaatagattgtagctgcagctgctggtctctgccacagcagtttggggatctgagctgtgtctgtgacctacacctcaggtcatggcaatgctggatccttaaccccactgagtgaggccagggatcgaaccagcatcgcatcctcatggatactagcagggttcctaactcgctgggccacaatgggaactccccacaggcccccgttttaaaaggcatcagactacgtagtatttcacattttgagttttctttttacaggtgtgcccccttttttgctctctgtgagggtctcttggcattttgttactatctccttacttacctatagtactacctatgtcctcccaatcttgtaatttacccttagtcaaaacttaacagacctggcattgaaatactgatacactgatataataatgaagacctgagtcagatgttttcctgtccacttcacctgctcagaaaacttggggggccaagtttctagatcttaactggtttagttagatgaaactgaagttctaaacaaatgaggtgttgcaacaaaacttgaaggtatggtaaaatcagaaaaatttttaaagttctgataatagaacttttccccaaaaatcaagaaagaagagtgtaatgttcagtcttttccccaaaaatcaagaaagaagagtgtaaagtttctctacttgctgagtttcaactctgagtcccctttctttttcccccagcctacattgactcctgcctttctgaaaaatagctgcatccccacactttgtgctttactagactcctttggagtatttacatttatgtctccaagtagaaatctcaagaatttcaagatatcgattgaattaactcatttgatttaattttccccctcctatactaccaccttagagcactgactgcttgataatcaagcgggttcttactggtcatttgattactcatacattaaaactagttatttataactaaataaatttaaccagatatattaaactctgtttgatttgtctcacactttaaaaagatctagttttaatgtttcaaaggcatatttcttaagactactcatgctgccaaaagaaaattctctagaggatagtggtagaaggtaaaaagtagttaaaaatctagtgacctaatagaaaggttgcgaaggacttgaaatgttttcctatgtaaggctgagtaggtagcagctaattgaatatagagcctagagttttacctctttaggaggtgggttttgttgcttgttcctttggtttaggaggtacattttttgatccttttcttcagaaaaagttggagtgtctgaaaagcctggatctctttaactgtgaggttactaacctgaatgactatcgagagagtgtcttcaagctcctgccccagctgagctacctggatggctatgacagagacgatggtgaagcccctgactcagatgccgaggtggatggtgtggatgaagaagaggatgatgaaggtgagtgggcacaaaacatccagtgaacctattttctgcctctcagaggtcctgatgaggctgctgaatgctcttgctattgaaaaaaataatacatgtccatgcatctaggcattctcttaaatttggagcacttgggacattgaaatcttcaaatgattcaaaatggaaaatggtttgttagccagttagtcttgaatttggagcctagacatcacactgtgttccaacccactgaagtacttgtggtttatggtttactaaaaggacagtggcctcaggcctcttgccatttctctccccctttcttggctacagcctacttacccttccgcattcagcttggtcaacacttctgggaagcgtttgatgaagctggtgagctaggttaggttcttgtgtgtgccacagcatcccctatgtacctctcagtgcttgtcactgctgttcttgtccctttctacaattattttatgcctttattcacagggcctagcacttaatgcagatacttggtacatacatgttttttatatccaaatataaatgtctttcctgcgtgtgatatatgactagaattttaacaggtaatgattttagaggagtatacgttagattctgtttttcattaataaaagaagtaatctctggccataacatggaattagaatatagattttatttttgacatttttttccatccagttatcttcaggaatctttgtatattttctgcttaaactattcctcctgattagcttgtgctttccttgcacggtgacttgttcactctgagtcactctcaggagaaaaggtttttcacctcttagtggcttagaggaagcaaagcggtaagttttcatatcagtcagcatgaaggacgcctaatctagaattcatgatattagaatttgcagtattactgtatttgaagcattcttttcaatatctctttaaagatagaagtttagaagacagaaatggtcaagaaagtggagagcatcatcaggcaccttgggtgtaattagtggggtagtactctggaagcatgtggttttcttttcagcagatttgagacaaggcaaaaagagatggacacgcaataggatgtctcatcttattccaagtgtttacctcacttattcccttcactgctagttctcagttcctaaaaaccagtctagtctacttaacttcaccttaaatgggttgaacagccacctgtgtgcaggggcccataaaggaaattccttggagagtggaaggcagttcttgagagtgggatcagtcaggcaacagatatttgagaatttcctgtatgccaggctctgtggaaaatagtgttaaaagaaaaagataaacacggtcctgtccactaggagtttactgtctactaagaagagaaatgttaagtaatcacaagtgagcaaagcgtgtagtcatggagaaacactaggtgttcatgtgagagcggatgagctgaggttagggggtctggcaaggctgaggaagcctgaggaaagggatgtttaactgagactcaagggtttagtcagtgttagccacgcagaaaagacagggaaaagtttgcagggtccggaggcaggagaggccacagcgagctgcaggaccaagggaggtaagagccagtgactagaggcctgtaccaaattgagtagaggcacagctcacaggtgcttttcagcctgcctggctgccaccactgtccccactgttcccagccccatccccatcatgaggttattacaggtatttcccaacatcctgatttgcacacctgttagcggtggtacccttattgcagagaaggaggctggtggggtttttttgggtttttttgttttgtctttttgtaaccttttactgtgaataatttcagacattgacaaaggcagaaataacagtaaaattaactttcatgttcctagtactacgttttggtgatgattagttcaaggctgatcttatttttgtacatacacactcttacccacttccccccttccttattgtgaagcaactcctagacgttgtatcatatcatcagtaagtattgtagcatacacctagttcaccaggactcctggcctctggattttatgggattcaggtcaagggtctgagctgcagcagcttgggagaaaggaggtgactggttcatgttttccctgatgttggagtggtcaaacctttgtcctgtagacccacccaaagttccccgccaccttagcaggtgtgccttctgagacacacagggtatttaacattcttttggggctcttttcagaaggagaagatgaagacaaggaggaggaagaggacggcgaggaagaagagtttgacgatgaagaggatgaagatgaagatgaagatgtagaaggggaggaggatgaagatgaagtcagtggggaggtcagtgcacctcctgcttctctgcttcctatttgtagttacaagtgtggatttttttaaaaagaaagaagagccttctgaagaaattagtgtacttgtaaatagactaacagtctgatttatttagcccccttccctttttagtaaatactaaacggaatacttagtgctaactagacagtgcttggctctgcagcgtttaagttttgactctttaactttgggaggcagcagtgagttgagtattcattcagtagagtgagaaaactgaaaacatcgagaatggatggtatgtcctttattgtattgaagggaagagtgtgtttactaattctgaactttttgtgtatccagcttaatacggtaaatacattatatgcctgttgttaaagagttgaggatgcaaagttgaataaaaatgtggtcctatttcaaaagagcaggtagtctggtttatgggacatccagcaataccacatctctgagaagctgaatgccatagggtaggagaaaggagtgacttaactttgaccctaaaggggatttgtgaaaacagaccaagaaagttagtcatcatggaagtttccgttgtgactagtatccatgaggatgctggttgaatacctggcctcgctcagtgggttgccatgagctgcagtgtaggtcaaagatgtggctcagatttggtgttgctgtggctggtgtacgccggcagctatatctccgattcaacccctagcctgagaacaattcttttgtagtacaaatataaggatgagcctttgtatgatctcataggtgtctaataagattgtctctgaaagaagcttattataagaaaggtaatatagaaatctgtccatatctgttttgaaattgaagatttcaaatttctgggagttcccatcatggttcagtggttaaagaatctgactaggaaccatgaggtttcaggtttgatccctggcctcgctcagtgggttaaggatatggcgttgcagtgagctggtggtgtaggtcacagacgaggctcggagcccgagttgctatggctctggcgtaggctgagagctacagctcctattggacccctagcctgggaacctccttatgccacaggtacggccctagaaaagacaaaaaggcgcgcaaaaaaaaaaaaaaaaattgaaatttctggaattatttattataagtttgtatactaatttaaaaatgtctgtcaaataaaacgctacttctgaaaagcaatttttaaagaaaatattaaattaagctcattaattgagggaaaaccagcagttctcattaatattaaagtaggtgaagataacattacagtttgtccttgaatggactgttaaatttattttatttatttattttctttttggctgccccatagcatatggagctccccagccagggatcagatcccagccacagctgcgaacacagccccagctgtagcaatgccagagccttaacccactgtgtggggccggggatcaaacccttgtcccagtgctctcaagatgctgccgatcccgttgccccacagcagaagctccgactgttaagtttattgacagtttttttttttcatacttcttaattagaattaatctaatgatggtggtatgctacttaccattgtttaggaagaagaatttggacatgatggagaagtcgatgaagatgaagacgatgaggatgaagatgaggatgaggatgaaggtgggttactacgtgcgctttgggggaatgtctctttattttttggctttttagggccacacctgaggcatatggagattcccaggctaggggtctaattggagctacggctgccggcttacagcacagccacagcaatgccagatccgagccgcgtctgcaacctacaccacagctcatggcaacgctggatccttaacccactgagcaaggccaaggatcaaacccacaacctcatggttcctagtcggattcatttcagctgcgccatgatgggaacttccagggaatgtctcaatttatattttgaagccactgagaagaaaataaaatgcctttggccccggtggtcttcagagctgcttttacagccccatcagtgcatctactggttcaacccacctgctctttagaccccattatttacgttactgtcaggcatgagatttctgtggagtttttccattacaaaagtcttaattggattatggtttttacaggacataaataacacctctccaattttattagtgttactcctttcccttctacaaccaaaaccagtgaaacatttagttatttattagaaaataactaactcttgtgttaagtttcagagtagcagactgttggctgtgttttccaacagttcatactttctcagcatctcagctctgcaggttgcaggactaaatttactttggttacagcaatgattaggacctagtctctgcttcagggagctttttggaacattaaattgaatgaagatctagttaatttcattgaagtggccatgaatttttactagttgacaaaacaatgatgtgttggcctctatgtctcaaatacctaaggagtgtaagaaatctttcttcacccacacccatgggatatggaagttcccaggcctgctcaaggtcacttgttagtaatagtaagcctggctgagaaacagcctagctaacttccagagtccttgctaaacgttttaataactgctaatgtctaattgttgggacctaccactgtaagaaaaataagaaatacttggtagacagcaatttaaaatggagaaaaactgagttaaccttgcagtggtttgagatgctgctctgcatttatctcccagtcagtaaaaagtttgttgttgttacctccattagcaaaattaggcacaggaaatgcctttccaattgtctcaaagtgaatttttgttactgtacagaggaggaagaaaacgagaaaggtgaaaagaggaagagagaaacagatgatgaaggagaagatgattaagatcccaaataaccaacaaaaaaaagaactgttcagtattggttggactgctcatatggatttggtagctgtttaaaaaaaaaaagtagctgtgatacaaaccccaggacacccacccacccaaagagccaaagaatagttcctgtgacattccgccttcctccattttagtccctcttggaaatccaccaccaagcttggggacttaccccaacagaattgtaagcgatgttttaggttctcagtgtaagactcttgctgtagcgtggatagctgtgattggtgagtcaaccacctgtggctaccagttacaccaagattgtaacagcatttttactttctgtacaacaaagaagctttgtaaataaaatcttaacattttgggtctgtttttttttttttgggggttttttttttttttcatgcctttcttttcttcttaatgaaaattttttacattaggacattttatgtgacaactgccaaaaaagtatttttaagaatttaagtgaaataaacacgttcctctttggt

SEQ ID NO: 5 - DNA, 20342 bp, Sus scrofa
accgcggctgccgagccgagcggcgccgcgcggggccgagtcgagccgagcagccacccgcgccgcgtcgccggtttaagcgcagtgcggagccgcggccgggggcggcggtagtgagaccagcgctgcgctccagcccccttttccctccatggtttctctccgctcccgtgagtaacttggctccgggggctccgctctcctgcccgcacgccgccagccgccccggaccgcgccgccggcctctgcctcgagcagaccccttccgacggccctcgctgcgcaggctgggagcctctcccccctccgcccccgttgcggaaagttaagtttgaagaggggggaagagggaaacatggacatgaagaagagaatccacctggagctgaggaaccggaccccggcagctgtaagcagaatccccttcgggctccctctccccccgatgacttgcatgtaatggtggccacctgcggggtcccagacgcgggctcgccgaccccggcgcgggcaagagcgcagctcgcgggctcggacgggaaaggcgggcgggcaggcgggcgggcgcggaggggggagcgagcgcgcgggattaactctttggcgcccgcgggcccctgcggccgtccagggaaggcggtggggtgggggaaagcaaactttgagctcttcgcccgccggggtcctttcccgaaggagcgcgtgtgcgtgtggccggcggcaagagagggaggagggggttgtgtaacgctgggagccatgtttgcagcctcccgagatgcgcggccgggcggaggccgggcctacggaggagccgcgctgccagtccggactgggcccgctgcgggccaggccggcctccgcgtgcccccggccggcccgggagggggctcgggcggagcaggaggctcctccagccaggtctcgcggttggcgccggtccggccaggacgggagcggaaggacgaacagagggttctttgcctccaagggggacaggaagccccctcgggcgccggggggcttgggcgggcgcggcctggcgcgcgcgagctggggaggggcgagcccgggtggcggaggtggcgcaaccgacgcccctcccgaggccaagtttgaaaaaaggagtcggttcccgccatttttcaagcctaaaaataaaactttgtctacctatctctcgcgcccctttcgacccccaggccttccccagtcccggtctccaaatgcaggccgcgctcggcccgagctagcagttgtggcgtaagcggcttctccctcccccccgcgccgcggcggcggagcccgggggcccctgcccgggaggttggcccctcggtgtgggcgggcggcggctcctcgcgtcagcccaggcgcgccacaggccgacgcagcgccatgttggcgggcacccgtctccttccgccgcgtgagtcggcctgcgggctctgtccgtccggccctgcccgcccgcaccggcggtggctctgagccgccgctcccttggccgagcctgcggtttgtttggcgcgggcctcgccagggctcggctcgcactggcgggagccgagcgctccggccgtcgccgactcatctttcgggcgcgctgccgccccctccccccttcttaaaagggcaacggcaggcggccgcctccgcccctagtcgcgggtacagacgggcctcggctgtgcttgcttgccgggcgggcgctgccccgcacgtgcttcagagccgcagatccaggccggtgctcgcctgccgcggctccgtgagtcgctggtgggccttgaagagtcacgtctttattctctaccccgccctccccgcgaagtagagcggcttcccgcggcagggcgcggggccatgtttcctggcgccagcgctgggaggccgcgcctccgccagaacccctccgcgggtgagtggcgtcccctggcagaggggcggcccggggaaagccctcaccaccccctcccgcccctgcgccccacactggagacgggcgcgtttcgggcagtcaggtagcgttgggtaacaagttgccaacttgtgggaattcgtcaagcaggctttccctggtgtgccaggggttttaaatctctgaggtccccacaaatgaggtgcggccctgctgcatctggtgttcccacctctccctggaagacctctggtggtgggcgtctcgactctgtcccctgagttttaaggttgagatttgaccgcggtcgtcccttccgtccatcagtcagacattttgtgtcggccacgtgctagtacattgaacctttaagcctcttcacactgaaacttgcaacctaattttgagaagagttaagacatttgaattattactgctcaggtccaaatcaggtgaacgtgagtaattaaatttacccgagtttccaaaaagaaaaatacgtatatggttctttaaagtgccttaagatctgggatttggattttagcaatgtgtgtagaacagtattaaaatactcggctaagggctctgtggctccctctgagaagaaatacaactgagctggtggtgtatatggaattttttcgcacatgaaataactaatactgatttttaaaatgcatatttatgtgcgttgggccttttattttttttcccatgaaatcaacttaagccttacccttttgccaaaacagtttttagtcatgtggctttttaaattaaaaggtcattttgccagttgcactattcacatttcaagtactcagaagtcccaaatgattaggggctgctgtattggacagtactgctctacagtaattcactggttttattaaataaatatttgccaacagcatgccagggcctggaaaaacagtgaggcagagcgcagccccttccattctgaagcctcagtaaccggtggtgcctgttgcctaggtgcaagttaggggccttgggagagtgtcataggagccagccaagattgtgggggcaaagggtcccctagggactgtaacagggagactgaaaacagtaagagaggttcttaggagaggaaagccttgaccttcaactgattgggggggggtgctgtaggtttaaaggaaatttttttttttttgtctttttgccatttcttgagcagctcctgtggcatatggaggttcccaggctaggggtcgaatcggagctgtagccaccggcctacgccagagccacagcaacgtgggatccgagccgcgtctgcaacctacaccacagctcatggcaacgccggatcgttaacccactgagcaagtgcagggaccgaacccgaaacctcatggttcctagtcaggttcgttaaccactgcgccacgacgggaactccggtttaaaggaaattttaaaagaagagtttaaaatttttagcacaaaagcatcatctttaaggtaagtgagaggttccaagatgattctaagtcagcaagtcttatgggtttgttgtggcgcgagactggggaaaggggaagaaccctctctccattgaatgtattggtataacacaacgaaatgcacaacagtgtattccagatgtcatcaagtggaatagaagactacttgagagtaagtggaggcttgatcataaatgttttaagaccagataggcttttgagtatggctttttttttaatttttttatttgggggtttgaagaagaccctggtaacagtttaccttgtaagtccaaaacacctttatatcagaagtgtcttttcatagtggaaaaagtggcttaagatggcatttttttttaatttcattttttattttttttaatttttcatcataattttttttttttattttcccactgtacagcaagggggtcaggttatccttacatgtatagattacaattacagtttttccccctaagatggcattttaacatatctttgaaaagaataatgatcagtgaaaatataggcaaggagaggaaaatttttatacaaaatattagtattaatttcactgagagcaaattgtatagtgccagaaaagtaccactgatattgattcacatattggtggtggtatcagatgtgaagagacatgcaatatcaagacgtaaaccaaatttagatatattccataattggaaaaaacacctgttcattatatgaggccctcatctttctatttttccaaaacatggcactgttattaactatggatctgggaacatctgtccttcagtcttatgttcaaaggatagaaagccatgcagttcctgtggcttgtaatctatgcccctgtgaaacactgtatgcttgactgagacatttcatatcccacaaataatagtttttctcctaggcccaatttactggagaattaagggttttcttacattacaggttttcattatgtatttttaaatccccactcccccacttttggcatttattgttgtgtctgttgtgattttgagctcaatgggatattctaattggttgcaatagccgctaattggggttatttccttatgtaagtagtgcctcttcattgaggataaattagatgcagataagcaaaacaatagtagatataaataagaaaaatttaaagaacctgaaaatctcacacacacccatcctaccatgtagatattctggtgtagagtccacgagaatgtttaattttttccgaactcaaattatactgttaatgcatatactatctcgttgctaatatagtagtaaacatctttatcttctatggcacaatttattattttacagtctcattgttaatgtctatacagatcatgtaaccattcacattaagtgaccagaaggatttttgcttttttaaatagtactgaaatgaacatttctacctatcagtaggatatgggtgtttccttccttcatgacacccaaacacatttgagaactactaattgtaaattctgttgtcattttgaaaacgtacttttaaaataatagtagggtggaagagtttaagattggttaactcatgaggctggaaattgtcaaaggtggcaggagttactttccacatttttgtttttttttgttttgttttttgttttgtctttttgtctttctagggccacacccgaggcatatgtaggttcccaggctaagggtccaatctggagctgtagccgctggcctgcgccataggcatagccatgccagatctgagtcacatctgtgacctacaccacagctcacagtaacgctggatccttaagccactgagcaaggccagggattgaacccacaacctcatggttcctattcggattcatttctgctgcaccatgacaggagttccactttccacattattggattatttcacttactgcaataatcatgtattttctaactaaaagaattgataatgacctttacgcctccatatctttttttccctcttataacaaattataactgataaatggggaaggtcactcaagcaggtagggaaaattgatttttttttcccctagactaactaggggaataggaaatgagagcatattggagaggatgaaaagaaaatttcttgatctcctgcggctactagctccaatccccgtaacttggctacagtaaatttcaaagttttcactgactagttgtgagtgcatcagctttgctgatggctatagaaaacaaaaaaattggataggaaatgttttggaattttgtttttagctcttaaatgtttacttaaattcatatttgacaaaaagctagtttagttgggaaaacgggggatcaagaagagtaaatttggcccccagtattagtctatccagttactactttggatcaaatagctccctaagttgaatgcacaaatagagaaatacctgcccaaccttccagtattacatggtagccttgagaggatttgggacatgaggaagaaagagtagggtgtttttccttgattagaaccttctgtttatttggggtctaattaggaggccatgacactatctctgccccgcatgctccaagcacctcccttgttaaggcagtctagattccttcacactccaggaagcaaattggggagagggagggtttaattatctcatgctgctgtcatggtgcctaaatacagacaccttttcaccagggtcctatttagattttggtctttttagggctcggatcccaagttgctgtggcataggctggaggctgcagctccgattcgacccctggcctgggaacctccatgtggtgtaggagtggtcctagaaaaggcaaaaaaaaagtaaataaataaataaaattaatcttttgcagttcctattgtggcacggtgcagttgaatctgactagaaactgtgaagttgcgggttcgatgcctagcctagctcggtgggataaggattggacgttgccccgagctgtggtgtaggtcggcagctgtggctctgattaacccgtcctgggaacctccatatgccgcaggtgtggccctaaaaaagaaaaaaaaaataaataaaatgagtctcacataaaaagacagcatgacattatttatgagaaacgtgttcaacagagaagattataacctctggtacatccatatgcttagaatttctttagtcgttaagaaatatttagagttgttaaaagcatattaagtaatattgcttcatcttgctaagactaaaaaaaataccaaaatagtaagtgacaaacagtaaatgctttgcattaattgattatatttaggatcagacggtagattctcttcatatccaagtttcccctggttcatcatctgctcagtcccctgcagtcctgattgatgtaaacctctatgccatttttttcttcatttgacagttgtgaaggcttttttttttctcagcttgcacccatggaaggaacaaacccaagtcacagcagtgaccatgctgagtccttccttaacccctaggccaccaggcaactcctgaaggctttttctcatattgagatatggtgataactaaaacagatatgaccttaccatgaagcagtgactcctccacccctacacctgtgacacatggaagtccccagtccagggatccaatctgagctatacctgggaaacaccaggtttttaacccactgcacctggctgaggatcaaacccgcactgccctgaggcaatactggatactaaaccagtggcaccacagcaggaactccttagcagtgacctttttaaaaatagatcaatattcttattattgaaatgtttaaataaggttatggaggagttcccttatggtgcaggaggttaaggatccattgccactgcagtggcttgggtctctgctgtggtgtggccacacacacaaaagttgtggaagtctcccagccagtcaactttccctgaggagaattcttgagaagactataagaaagcaagtgtgtgaaatgttacataagggataacgcattatatattctctaccatttttgtcccacagcatatcctggaaattagtccctccttgatggacaattaaattgccttctaattttctcagttcttttttttccagttacttcttatgtcttatttataagcctttcggagtgttgaaactaatgggtcacctttgggtactacaaacccaattctaattggtactaagaccaattcttcttaagtctcctttgcaggatcccccagggttccatccttggttctcttcctaggaattccatccttctactttttattgcttctgccctgacttccaaatacagaacttaaaccgaggactcccctgaactccagacctgcatgtctagctgactggggatactttcatctggatatcccatggaaacaaacttggtatcttttgtagtagtcattacatatctgcctctctcccaaaaagaagccactccttcctatttccatctagctacatagtccccatttctcaaacgaacctcagttctttatcatcttttgtaccccacagttaaacttgcagattttgaccactttaacttttttcccctcccagtttctgttatttggttcagcaaacttaattctctcatatttgaatgttttatggtagtctttttttgggctatgccacggcatgtggaagttccccgtccatagattgaacccacacctgagccactacagtgacgttgctgaatccttaacccacttcgccgcaagggaactccagctttatggtagtctttgatgaccttagttaaagcagaattttgtcagttgagaacaatgtccaagagttgatttcacagtggactcgaggtataatgtttaaactcctctgtggcttttgacatattggtgtcatcttgtataatatttttgaattctctgtcagataatagttgtagaaaatctaccaaatgaaatggaaatgtttagctgtattgcaatactacttaggtgagtggtgattacagtggccttttttttttttttaatgattagttggttttagggttttttttgttttttgttttcttttgagggccacacccccagtgaaatatgttagttcacaggctaggggtctaatcagagctgcagctgctggcccatgccacagcacctagggatctgagccacatctttgacctacaccacagcttacagcaatgccagatcctttaacccattgagtgggtccagggatcaaaacctgagtcttcctggatactggtcaggtttgtgacccactgagccacaatgggaactcctgttggaaagcttgcctggaggttacttcctcttttatttttttggccaccctgcagcacatggagttcccaggccagagatcaaatcctagccacagttgcaactttaaccctctgtgcctggccagggatcaaacctccttcccaagaggctgttgagtcctgttgagccacagcaggaattccagtttgtttgtttgtttgtttttctttctttttttttaccttagggctgcaccgtggcatgtggaggttcccaggtactaggggtcaacttggacctgcagctgccattctgtgccacaaccacagcaactccggatctgagcctcatctgtgatctacaccacaggtcacagcgtgtttgtttgttttttaatacacaagaagtacaaagagttcccattgtggctcagctacctaaaaacgcaattggtatccacgaggatgcaggtttgatccttggcctacctcagtggcttaaggatctgtcattgtcacaagctgtggcataggtcacagatgatgcagcttggatctggcgtggctgtggtgtgggctgacagctgtagctcccactccacccctatcctgtgaacttcatatgccacaagtgcagcccgaaaaaggaaaaaaaaaaaaaaaaaaaaagaggaatacatgcttagtacagataggaataaattgcaacgatccttgtcattctccttcacccttgcccagaggttactttctcagcatttactctgtcccaagcctactttctacagaagttccacttcacagatgaggaaactgaggcacagagaagttaaataacttgcccaaggtcacacaggttgtaagtgacaaagcagatagaatggaacctgtatgcgtcctgaaagcaggacgcagacaggggagtgagaagtgctgaagaagcaagtgagaagttgtggtgttatcggtgaatctctaaatctgtttgcttctctaactggggggagggtatggtggtacaaagaataatgagtaaattctccatagatgatagcaattactagagcagtatccttggactttgtatgagaggatgaagatgttactacctcctgttttcattttaaaactgtcagcaagcatctccttcccttatacatgcttgattaatgctattaaatgtgttagattcactgcaagaatgcctttggcagttaaaactaatttgcatcagtgtaaatttatcaaaacgtgtttaaaacttgcaagcttcagagtcagccacagagcaagaacagcagtagagactatcatggtagatagtcacacagtagactgtttattagataatcagtattcaaaattctcagatatacttttggatggatttgaattctgaatattaagatctccaaagaaggagattttatggcctaaaaagaacctaatatctaacagtttgcccccccagaaatagctttctcacatgtaacacagaatgatctttgaattaagacctcctgtgtcttgatcttttcctaatatcaagataatctaagtaaaaattaataaaaccacaagtggaaatgtgtagctgagaaacctgtagccaaaatctcttagtgatcttgatgggagaagtaaagctttcctcttttctttgtgtcagtctcctgcgccttgagctaggcttggcctaaaagggttgctggggagagtggtttgggaagggataatcttcactctgcatttgtagttaaagctactccttggggaagagacttaggaaaaagaataaggggggtgtcatttcttcacttacatcctaaggactatagtttctgtctctggaaagtaaagaatttaaatctttgttgtacatggtgtgacatcccacccttgatatctatcagaatattgttactaaaggcttaatcgtttttcctttatttatagctgagccaggtctaagtagagcctgcccctatatggttggagtttttgctttgttctttgttttctatatggttttgaaagcttgtctcctcctctttgtcacccacaggttcgagaacttgtgctggataattgcaaatcaagtgatgggaaaattgagggcttaacagctgaatttgtgaacttagagttcctcagtttaataaatgtagggttgatttcagtttcaaatctccccaaactacctaaattgaaaaaggtaagtgctttttctttaacagtaaaagagagaaccattctggggaaggggaaaatatatgattctatctgtaaggaagcatttagtgtagcagaaagcgcatggcctttggaactgggcagatcagggattgaattccagctctatcatttccctgatgggtgatcttctgcatgttacttaatctctccaaggctcaatttcctcacctgtaaactggtgataccacctgaccttccagaatggctgtggtgtttgaaagtagtgcatgttgaatgctcaataaataaatagtggttatgaagaataattgttagggatttattgtaatgtcagctacttttgttcttaatatgctctggcttaggaatcacaggtgcctcccactcttcatgtttttttgttaaggccaagtttaagtaaaggcttttcaaatttgtactccatggtatttcaaactcagtatataattgttatttttgctttttagggccacacccacggcacatggaggttcccaggctaggggtcaaatcggagctgtagccacgagcctataccatagccaggacaatgccagatccttaacccacagagcaaggccagggatcgaacctgcatcctcatggatgctagtcagattcgtttctgctgagccacagtgggaactccccattatgtaattcttaatgactggtaagtttaaaatgtgatttactccaagagttcattttaacaacattgctgtatttccctgtcctacttgatagctcattgttagtgctttattggtctaattataatcaatcattgtcaccttcaacctccccctcacccaaaaaacatgtttttttcatgtccttgcacatttacctgtcacagagcccccagtatgtcagaagtggaagaaacttatatcttgtggcctcggcctttgttttataggcacagtagtagatccagaaaggtatggtaatttgcctaaagccactcacgaaagtggttagtagtagagccagaattagagctcatatcttctatttgctaacccagtaccttttccattggcagtgttgcagaattctccactgtttacctcatctctgtatcagggagtttgagctgaacctttaatctaaaaaagatacgcatagaaatctgaagtcaaatttaggccaaagacaagtaagctgttcctatagcctgcctgcttgaatcccgagagggacttttttttggttaagtatatgaattaaaaatcaggagtgggagttcccatcatgacgaagcggaaacaaatccgactaggaaccatgaggttgcgggttccatccctggcctctgtcagtggattaaggatctggcgttgccgtgagctgtggtgtatgttgcagatgaacctccatgtgccgtgggtatggccctaaaaagcaaaaaaaaaaaaagaaaaaagaaacaggttctgggagaaattttggtgtgtaaatgtcacaagtttcctaaatttaaacattgatttcatttcaaaataaatatgccactaaatgctttggcaaactgccttgctgtccctactccttaagatatttgtgttgaaaggatatgaatattatacgtatcgatattctaacaaccaagagaaatggtctctattttgaatttctaaaacctgtgtaaagctaataacacttgtgtctttgttggtatagagatgtattttaaaatctagaccacagttagatcttttattggactatcccattggaaggaaaaaaaagttttgaactactgcattttttctcttctgaaatacttaaaaacaaccaagcagcagacttactttttttgttgttgttggttttttgtttgctttttttagggctacacctgcaccatatagaagttcgcaggctagggactgaatcagagctgcagctgccgacctacgtacgccacagcaacacctgatctgagtcacatctgtgacctacgctgtagctcttggcaatcaatgccagatccttaacccagtgagtgatgccagagattgaacccacatcctcatggatactagttgggttcttaacctgctgagccacaacaggaactcccagatttactgttttttaaactcattctttcaacaaatattttaatttttagaagttcctctgcatcatgtagttcatttcattgcatgcccaactaaatcatgtaagttttcatgccatttatcactgtaacagctatgtaatcttgggcacttacataatctcaatagttcattttccttttctgtaaataggggtgataattctacttgctccgtaggatttactgtgagatcagatgagttcatgtatttctagtgctttgaatagtgccttaagcacttgggtacttagtacttaagtactgtgtaaaggttagatacggttactgttgttgttggcacttaaaattgaaactagctatatggccttagttttcgtatctgcaaaatgaagagtttgaattagatgctcttaaccatcttatttttccacgcttcagtttcttttactcttaagattcacatattccttggtgaaggttcgttccttcattgacagaccagttgccgtgctgcttgatcggcagctaagaaattagagtaggttcttaaaaaggcttcttgccaagtttgtgcaaaaagtatcctctgaggagttggttttgtcagctttgaacctattgccccactcccttttctgaggtaatggagcttctttaaaggcttgtaccattcccatagctttcagggcagcatttctggtagcttccagatgtagaaccccatggcaagtcagcactgtacagaaccagattaggtttcaagtgggcattgtgagctttgcttggcacacagaacaagctgcttagaatgcacagaccatttacccttcttggcaggtatcgaatattacaacttctcaaagaattctaatttgctttgacccactttttaggttagaaaatgtattcactgatattagggaccagcaaagtgttctaattagcagctggttaagaaaacacaactcttttcattcaaattgtctctccttccccaaagtgttctggggatctgtaaacttatttgggtttaatgaaacaaaatgagcatatgtgccctaataaaaaatagagatcatttgatcttggttggtgtttaagaactatattggttacttctaacaccttaatgatatgtgtttctttttgtgtttgtgtgccgtgtgcatttttccctttaacagcttgagctcagtgacaatagaatctatggaggtctggatatgttagcagaaaaacttccaaatctcacacatctaaacttaagtggaaataaactgaaagatatcagcaccctggaacctttggtaagtagttgagaatttggaaaacaggactttctggtcattttcattttcatatttctttatggtgagggaaataattgaaagttataatggagaaagtggtgatttttttatagtaaactttttatagaaagagtccagttttaaagatcagagcctcactagttatgtgttcctgtggcattactctccctttctgattattatggtggcttccttcaaaatgcttttcttttgtcctttttaaatgtcatattgactatagccttaaacatccatcttcaaattttttccccagactggccaggctgttctgtacttttgtacttttccaaaaaggctgtttatgttgggtggcatatctgactgtagaaggtaccatccaagggcagctccagtgagttttaggccttttaattcatgatcttgtgctctagctggatcattgttgcctaaagttttgcatgggaacccctaaattctcctcttagtcctggaataagctgtggaaggttaagtttaagtgctacttgggttacagacttgctgtgtgaccttgggcaaattgcttcttctctctgggcctcagtttcctcacttatgaagcagaaaggataatcctgccttacttcttaggaattctgagagtaaaataggtatttatttaccttgctttgtaagttgggaagctaagctaattgggggtttagtccatgtggaagttacaagtggccagaaaagagcttcagaaggcaagggttcatgcagagtagggggctttggctgccacctgaaaattccgtgatttcaagattgttaaatgacttttccccctaaatatgacattcttgtctattttaataaggctaatgaaactcagatttgttttataaccgcccaaagaagttttgtggcttctttctgggtttttgtttgtttttctgttgtacataaagtcagtatttccatctgatttaacttgcagacattaattggaagagaggctacacagtggataagagctgtctttcaggatccagcagagtagaacccaagagtatgagacatccttctgctatctctatcttttctggtgtcacaatatatttaaatatttggatttcattcacttacacagaatgctttattgatatttcgagggaagataatgtagggtcagataattgagactcctccaatatagatttaatccccatttactaagtccctttacatttcattaagtggatcacattgagctcatttctcattaagtgttgggagcagcctgttgattacctttgctccatgaattttgccccttttttcctgttaaactcagatacttgagggcaccctatttttttaaaattagttttcctccaaatcaatccccatttccaatgttaaagcaaacatttattgtgttttgctttattcagggacattaacatctgcccattgtatcctcatatgatgcagagaagagaaactgtcctgttagaaaggaggaaaccaagtttaagccgcaggataaatggcaagtagggattcaaatccaagtccatcattctttgcactgcccttgggacctgtcttttcttttaatttacacgttttttttcctacccaaattgacctaagctgggagttagaacaggagcactaaattaagtgcttaggctctcccagtcagatgggctgcataaaagcctttgtttgtgttaatgacgagtctatcaatttagggtcatagaaaacttaggaatcccttttctctagaacagagtaccaggcagtacctttccttgctaggtcactggccattgcctaatctcatggcaaccctagtcatctttgatttttttcttggaggcttttgtcaatgtcctaacattcagaggcagagcagaagcaaatgttgtgtgggagttgtttgcatgggtgtttctgacctgggcggtgatgtggttagggccctttggtggatatgaaagtctgaatccccttggacagtgaaatatgagaaataatcatttaaatatttaccatttgcagaggatctgctttgtacgatacaccaaagtggatgctttatgtgtgttgttcataatcctcaacatttctccagagtggagagacatagcatggcccacgttttacacatgaggaagctgaggcttaggagaggttgaatcccttgtccagagtcacacacctggcaggccagtgacagagccacagtgccacacacccagggctatctgggaaagcctgagtgcctgccattcttctgaacttgctgttcagattcctggatgtactaggtgggtctcctgaagttacaacttaaggataaataaaactgtaggagaaagtgtgggggcgggggaaatgttgggtccattttgacttctgaaagtattcttcagttgtgaaaaacaccatcctcatcctcatcaaccacatacattttgaacaccgtctactttgagcccagttcttacagtcaatgcaatgattgtgaatgcctctgcttactacagggacattaatcgagagacaaagaaggcatcaattcaaacttccttggacaccttttttaagagacctgggccatccaaaccatcccccaaagcccttctaaattctaagaaggcaagcaaaattattgttaataaaatgtttaatgtttattatggatagcctattagttttaggccaaatttctgagatggtagagttgtgaattttttttctttctttttttttaaagccgtatttacacattacattgggatcctgaatatctgtgtgtagtgtattttggacctttaaagcacagttttactgctctaaacaattttagagttctaccattattaggagttttgttgatgtttatttggtttcactttgttttctagcatattgtttggcatgtctgaattattcatatgggtcctttctaaagaagtggccaaaaatgtcacggattcagagtttcagaaacaggaggccctgtgttaggctagtcaatagagttagaaaatgtgcttggggcactgttgagcattaagatcaggggttgtatgcatttttttgtacatccattcctagggaataatattgaacagtaaatggctgcttcctttaagtgaagaatttatactgagcctctgtggggaaagctgcctaaatttacttgtggttctatattagctgttacagagtcaacccttttgtgaaaagagttccccagttgtctggggtgctatttcaacattttttccccctctttggcaagaacgcattcctgggcttccggagttcagggactgtctagtaggaacctaatctgaaagctgcatgtcataaaagcgtttctccctgtgagccctagggctggggacaactatcttaaagaaagacctcaggggactgatttacataagcacattattggatcagcgacctcttggatcagtgtacgtggctgttttgaggagtacatttgcctgttgctcttaactctgttctgggtctgtgctcccaagggctgttcagtgagaataaaatcaatgtgggcacctctttgatgaagaaaatgaaggtttgtgagtgcaggagtcagcaaccctttgctctcaaggaccagatagtagaccacctaggttttgtaggccttagtctttgttacagccactccactttgcccttatagctcaagagaagccacacaaagttcctaaacaagtgagtgtggctgtgttccagtgaaagttagtttacaaacacgagaggcgggcaggatgggccagcacagtttgccaagccctgctttaaagcagagattttgacatcattttgtaactcccaagaattatacagacaccgtagatcctgaagacaaggttttgtttcatctatatctcttcccaggcccttgtgaatattgaaatagatttccaatgaagtatcaaaatccttaaacatcaacatttattttctgcaacttacttcatgaagagatcctcttaatatttttttagagaatggtaaatcttttgattcaaaacctttaaatgctaaatttgtgggagttcctgttgtggttcagcaggtttggaacccagcacagtgtctgtgaggatgtcagtttgatccctgggctcattcagtggattaaggattcagcagtgctgcaggctgtggtgtagtcacagatgcagctcaaattcagtgttgctgttgctgtggtgtagaccacagctgctgctcctattcagctcctcacccgggaacttccatatgctacaggagcagctttaaaaagaaaaaataaataaaggttaaacgtaggaagccatatatccatatgcccccaggcccccctcttttgctttttagggccacacctataacatatggaagttcccaggctaggaatagattgtagctgcagctgctggtctctgccacagcagtttggggatctgagctgtgtctgtgacctacacctcaggtcatggcaatgctggatccttaaccccactgagtgaggccagggatcgaaccagcatcgcatcctcatggatactagcagggttcctaactcgctgggccacaatgggaactccccacaggcccccgttttaaaaggcatcagactacgtagtatttcacattttgagttttctttttacaggtgtgcccccttttttgctctctgtgagggtctcttggcattttgttactatctccttacttacctatagtactacctatgtcctcccaatcttgtaatttacccttagtcaaaacttaacagacctggcattgaaatactgatacactgatataataatgaagacctgagtcagatgttttcctgtccacttcacctgctcagaaaacttggggggccaagtttctagatcttaactggtttagttagatgaaactgaagttctaaacaaatgaggtgttgcaacaaaacttgaaggtatggtaaaatcagaaaaatttttaaagttctgataatagaacttttccccaaaaatcaagaaagaagagtgtaatgttcagtcttttccccaaaaatcaagaaagaagagtgtaaagtttctctacttgctgagtttcaactctgagtcccctttctttttcccccagcctacattgactcctgcctttctgaaaaatagctgcatccccacactttgtgctttactagactcctttggagtatttacatttatgtctccaagtagaaatctcaagaatttcaagatatcgattgaattaactcatttgatttaattttccccctcctatactaccaccttagagcactgactgcttgataatcaagcgggttcttactggtcatttgattactcatacattaaaactagttatttataactaaataaatttaaccagatatattaaactctgtttgatttgtctcacactttaaaaagatctagttttaatgtttcaaaggcatatttcttaagactactcatgctgccaaaagaaaattctctagaggatagtggtagaaggtaaaaagtagttaaaaatctagtgacctaatagaaaggttgcgaaggacttgaaatgttttcctatgtaaggctgagtaggtagcagctaattgaatatagagcctagagttttacctctttaggaggtgggttttgttgcttgttcctttggtttaggaggtacattttttgatccttttcttcagaaaaagttggagtgtctgaaaagcctggatctctttaactgtgaggttactaacctgaatgactatcgagagagtgtcttcaagctcctgccccagctgagctacctggatggctatgacagagacgatggtgaagcccctgactcagatgccgaggtggatggtgtggatgaagaagaggatgatgaag

SEQ ID NO: 6 - protein, 249 aa, Sus scrofa
MEMDKRIHLELRNRTPSDVKELVLDNCRSNEGKIEGLTDEFEELEFLSTINVGLTSVANLPKLNKLKKLELSDNRISGGLEVLAEKCPNLTHLNLSGNKIKDLSTVEPLKKLENLKSLDLFNCEVTNLNDYRENVFKLLPQLTYLDGYDRDDKEASDSDAEGYVEGLDDDEEDEDEEEYDEDAQVVEDEEDEEEEEEGEEEDVSGEEEEDEEGYNDGEVDDEEDEEEPGEEERGQKRKREPEDEGEDDD

SEQ ID NO: 7 - protein, 259 aa, Sus scrofa
RCLLVCLLSPPRSWAPFLTPFTPALSFQVKELVLDNCRSNEGKIEGLTDEFEELEFLSTINVGLTSVANLPKLNKLKKLELSDNRISGGLEVLAEKCPNLTHLNLSGNKIKDLSTVEPLKKLENLKSLDLFNCEVTNLNDYRENVFKLLPQLTYLDGYDRDDKEASDSDAEGYVEGLDDDEEDEDEEEYDEDAQVVEDEEDEEEEEEGEEEDVSGEEEEDEEGYNDGEVDDEEDEEEPGEEERGQKRKREPEDEGEDDD

SEQ ID NO: 8 - protein, 261 aa, Sus scrofa
MDMKKRIHLELRNRTPAAVRELVLDNCKSSDGKIEGLTAEFVNLEFLSLINVGLISVSNLPKLPKLKKLELSDNRIYGGLDMLAEKLPNLTHLNLSGNKLKDISTLEPLKKLECLKSLDLFNCEVTNLNDYRESVFKLLPQLSYLDGYDRDDGEAPDSDAEVDGVDEEEDDEEGEDEDKEEEEDGEEEEFDDEEDEDEDEDVEGEEDEDEVSGEEEEFGHDGEVDEDEDDEDEDEDEDEEEEENEKGEKRKRETDDEGEDD

SEQ ID NO: 9 - protein, 253 aa, Sus scrofa
MDMKKRIHLELRNRTPAAVRELVLDNCKSSDGKIEGLTAEFVNLEFLSLINVGLISVSNLPKLPKLKKLELSDNRIYGGLDMLAEKLPNLTHLNLSGNKLKDISTLEPLKKLECLKSLDLFNCEVTNLNDYRESVFKLLPQLSYLDGYDRDDGEAPDSDAEVDGVDEEEDDEEGEDEDKEEEEDGEEEEFDDEEDEDEDEDVEGEEDEDEVSGEEEEFGHDGEDEDEDEDEEEEENEKGEKRKRETDDEGEDD

SEQ ID NO: 10 - protein, 271 aa, Sus scrofa
MDMKKRIHLELRNRTPAAVRELVLDNCKSSDGKIEGLTAEFVNLEFLSLINVGLISVSNLPKLPKLKKLELSDNRIYGGLDMLAEKLPNLTHLNLSGNKLKDISTLEPLKKLECLKSLDLFNCEVTNLNDYRESVFKLLPQLSYLDGYDRDDGEAPDSDAEVDGVDEEEDDEEGEDEDKEEEEDGEEEEFDDEEDEDEDEDVEGEEDEDEVSGEEEEFGHDGEVDEDEDDEDEDEDEDEGGLLRALWGNVSLFFGFLGPHLRHMEIPRLGV

SEQ ID NO: 11 - protein, 348 aa, Sus scrofa
MKMKSVGRKKNLDMMEKSMKMKTMRMKMRMRMKECGADCAKFQKSELEYKFNRKALERPYTSKHSWGKTYGEHKRHLEFSHAQYRELQKFAEEVGIFFTASGMDEMAVEFLHELNVPFFKVGSGDTNNFPYLEKTAKKGRPMVISSGMQSMDTMKQVYQIVKPLNPNFCFLQCTSAYPLQPEDVNLRVISEYQKLFPDIPIGYSGHETGIAISVAAVALGAKVLERHITLDKTWKGSDHSASLEPGELAELVRSVRLVERALGSPTKQLLPCEMACNEKLGKSVVAKVKIPEGTVLTLDMLTVKVGEPKGYPPEDIFSLVGKKVLVTIEEDDTIMEESVENHGKKIKS

SEQ ID NO: 12 - protein, 313 aa, Sus scrofa
MPLELELCPGRWVGGQHPCFIIAEIGQNHQGDLDVAKRMIRMAKECGADCAKFQKSELEYKFNRKALERPYTSKHSWGKTYGEHKRHLEFSHAQYRELQKFAEEVGIFFTASGMDEMAVEFLHELNVPFFKVGSGDTNNFPYLEKTAKKGRPMVISSGMQSMDTMKQVYQIVKPLNPNFCFLQCTSAYPLQPEDVNLRVISEYQKLFPDIPIGYSGHETGIAISVAAVALGAKVLERHITLDKTWKGSDHSASLEPGELAELVRSVRLVERALGSPTKQLLPCEMACNEKVGSDPARCFCWEGLQWACLRGGL

SEQ ID NO: 13 - protein, 319 aa, Sus scrofa
MPLELELCPGRWVGGQHPCFIIAEIGQNHQGDLDVAKRMIRMAKECGADCAKFQKSELEYKFNRKALERPYTSKHSWGKTYGEHKRHLEFSHAQYRELQKFAEEVGIFFTASGMDEMAVEFLHELNVPFFKVGSGDTNNFPYLEKTAKKGRPMVISSGMQSMDTMKQVYQIVKPLNPNFCFLQCTSAYPLQPEDVNLRVISEYQKLFPDIPIGYSGHETGIAISVAAVALGAKVLERHITLDKTWKGSDHSASLEPGELAELVRSVRLVERALGSPTKQLLPCEMACNEKWDFLAAFILKMHVHWEIKMTVKRNKLPSR

SEQ ID NO: 14 - protein, 335 aa, Sus scrofa
MVLKDSDLIAVALAFLFSLRECGADCAKFQKSELEYKFNRKALERPYTSKHSWGKTYGEHKRHLEFSHAQYRELQKFAEEVGIFFTASGMDEMAVEFLHELNVPFFKVGSGDTNNFPYLEKTAKKGRPMVISSGMQSMDTMKQVYQIVKPLNPNFCFLQCTSAYPLQPEDVNLRVISEYQKLFPDIPIGYSGHETGIAISVAAVALGAKVLERHITLDKTWKGSDHSASLEPGELAELVRSVRLVERALGSPTKQLLPCEMACNEKLGKSVVAKVKIPEGTVLTLDMLTVKVGEPKGYPPEDIFSLVGKKVLVTIEEDDTIMEESVENHGKKIKS

SEQ ID NO: 15 - DNA, 20 bp, Sus scrofa
ttcacctggaaagacaaggc

SEQ ID NO: 16 - DNA, 20 bp, Sus scrofa
ctctttcacctggaaagaca

SEQ ID NO: 17 - DNA, 20 bp, Sus scrofa
cacgccggccttgtctttcc

SEQ ID NO: 18 - DNA, 20 bp, Sus scrofa
ccaggacgagctctttcacc

SEQ ID NO: 19 - DNA, 20 bp, Sus scrofa
ccaggtgaaagagctcgtcc

SEQ ID NO: 20 - DNA, 20 bp, Sus scrofa
catttgaccgacaattgtcc

SEQ ID NO: 21 - DNA, 20 bp, Sus scrofa
agctcgtcctggacaattgt

SEQ ID NO: 22 - DNA, 20 bp, Sus scrofa
gacaattgtcggtcaaatga

SEQ ID NO: 23 - DNA, 20 bp, Sus scrofa
tcaaatgaaggcaagattga

SEQ ID NO: 24 - DNA, 20 bp, Sus scrofa
gttcttcaaattcatctgtg

SEQ ID NO: 25 - DNA, 20 bp, Sus scrofa
cacagatgaatttgaagaac

SEQ ID NO: 26 - DNA, 20 bp, Sus scrofa
ttcttgagtacaatcaatgt

SEQ ID NO: 27 - DNA, 20 bp, Sus scrofa
gtaagtttgcgactgaggtg

SEQ ID NO: 28 - DNA, 20 bp, Sus scrofa
ctttggtaagtttgcgactg

SEQ ID NO: 29 - DNA, 20 bp, Sus scrofa
ttcttaagtttgtttaactt

SEQ ID NO: 30 - DNA, 20 bp, Sus scrofa
aaagttaaacaaacttaaga

SEQ ID NO: 31 - DNA, 20 bp, Sus scrofa
ctaagtgataacagaatctc

SEQ ID NO: 32 - DNA, 20 bp, Sus scrofa
taagtgataacagaatctca

SEQ ID NO: 33 - DNA, 20 bp, Sus scrofa
aagtgataacagaatctcag

SEQ ID NO: 34 - DNA, 20 bp, Sus scrofa
agtgataacagaatctcagg

SEQ ID NO: 35 - DNA, 20 bp, Sus scrofa
taacagaatctcagggggcc

SEQ ID NO: 36 - DNA, 20 bp, Sus scrofa
acttttctgccaatacttcc

SEQ ID NO: 37 - DNA, 20 bp, Sus scrofa
ctcagggggcctggaagtat

SEQ ID NO: 38 - DNA, 20 bp, Sus scrofa
aaatttagatgtgtgaggtt

SEQ ID NO: 39 - DNA, 20 bp, Sus scrofa
cacttaaatttagatgtgtg

SEQ ID NO: 40 - DNA, 20 bp, Sus scrofa
ctcacacatctaaatttaag

SEQ ID NO: 41 - DNA, 20 bp, Sus scrofa
cctcagcacagtagagccac

SEQ ID NO: 42 - DNA, 20 bp, Sus scrofa
gataattgcaaatcaagtga

SEQ ID NO: 43 - DNA, 20 bp, Sus scrofa
ataattgcaaatcaagtgat

SEQ ID NO: 44 - DNA, 20 bp, Sus scrofa
atcaagtgatgggaaaattg

SEQ ID NO: 45 - DNA, 20 bp, Sus scrofa
tcaagtgatgggaaaattga

SEQ ID NO: 46 - DNA, 20 bp, Sus scrofa
accctacatttattaaactg

SEQ ID NO: 47 - DNA, 20 bp, Sus scrofa
ttcctcagtttaataaatgt

SEQ ID NO: 48 - DNA, 20 bp, Sus scrofa
tcctcagtttaataaatgta

SEQ ID NO: 49 - DNA, 20 bp, Sus scrofa
ttttcaatttaggtagtttg

SEQ ID NO: 50 - DNA, 20 bp, Sus scrofa
tttttcaatttaggtagttt

SEQ ID NO: 51 - DNA, 20 bp, Sus scrofa
ctttttcaatttaggtagtt

SEQ ID NO: 52 - DNA, 20 bp, Sus scrofa
gcacttacctttttcaattt

SEQ ID NO: 53 - DNA, 20 bp, Sus scrofa
caaactacctaaattgaaaa

SEQ ID NO: 54 - DNA, 20 bp, Sus scrofa
ctcagtgacaatagaatcta

SEQ ID NO: 55 - DNA, 20 bp, Sus scrofa
agtgacaatagaatctatgg

SEQ ID NO: 56 - DNA, 20 bp, Sus scrofa
caatagaatctatggaggtc

SEQ ID NO: 57 - DNA, 20 bp, Sus scrofa
aagtttagatgtgtgagatt

SEQ ID NO: 58 - DNA, 20 bp, Sus scrofa
actacttaccaaaggttcca

SEQ ID NO: 59 - DNA, 20 bp, Sus scrofa
aactacttaccaaaggttcc

SEQ ID NO: 60 - DNA, 20 bp, Sus scrofa
aattctcaactacttaccaa

SEQ ID NO: 61 - DNA, 20 bp, Sus scrofa
tctcgagcccccagcacccg

SEQ ID NO: 62 - DNA, 20 bp, Sus scrofa
agtgtgcgccgcgggtgctg

SEQ ID NO: 63 - DNA, 20 bp, Sus scrofa
gtgtgcgccgcgggtgctgg

SEQ ID NO: 64 - DNA, 20 bp, Sus scrofa
ctgggggctcgagaaccgag

SEQ ID NO: 65 - DNA, 20 bp, Sus scrofa
aaggctcaaccagctccgct

SEQ ID NO: 66 - DNA, 20 bp, Sus scrofa
gctcgagaaccgagcggagc

SEQ ID NO: 67 - DNA, 20 bp, Sus scrofa
cgcgcgttttaggactttga

SEQ ID NO: 68 - DNA, 20 bp, Sus scrofa
aacccacggccgcgcgtttt

SEQ ID NO: 69 - DNA, 20 bp, Sus scrofa
cttcaaagtcctaaaacgcg

SEQ ID NO: 70 - DNA, 20 bp, Sus scrofa
agtcctaaaacgcgcggccg

SEQ ID NO: 71 - DNA, 20 bp, Sus scrofa
gtcctaaaacgcgcggccgt

SEQ ID NO: 72 - DNA, 20 bp, Sus scrofa
aaaacgcgcggccgtgggtt

SEQ ID NO: 73 - DNA, 20 bp, Sus scrofa
atcaataaaccccgaaccca

SEQ ID NO: 74 - DNA, 20 bp, Sus scrofa
aaacgcgcggccgtgggttc

SEQ ID NO: 75 - DNA, 20 bp, Sus scrofa
aacgcgcggccgtgggttcg

SEQ ID NO: 76 - DNA, 20 bp, Sus scrofa
gtttattgattgaattccgc

SEQ ID NO: 77 - DNA, 20 bp, Sus scrofa
ttgattgaattccgccggcg

SEQ ID NO: 78 - DNA, 20 bp, Sus scrofa
tgcagaggctcccgcgccgg

SEQ ID NO: 79 - DNA, 20 bp, Sus scrofa
tgattgaattccgccggcgc

SEQ ID NO: 80 - DNA, 20 bp, Sus scrofa
ctctgcagaggctcccgcgc

SEQ ID NO: 81 - DNA, 20 bp, Sus scrofa
ctcgcgctctctctctgcag

SEQ ID NO: 82 - DNA, 20 bp, Sus scrofa
cagagagagagcgcgagaga

SEQ ID NO: 83 - DNA, 20 bp, Sus scrofa
gagagcgcgagagatggaga

SEQ ID NO: 84 - DNA, 20 bp, Sus scrofa
gagagatggagatggacaaa

SEQ ID NO: 85 - DNA, 20 bp, Sus scrofa
aacggattcatttagagctg

SEQ ID NO: 86 - DNA, 20 bp, Sus scrofa
ttcatttagagctgcggaac

SEQ ID NO: 87 - DNA, 20 bp, Sus scrofa
tggcaaatgctcacatcaga

SEQ ID NO: 88 - DNA, 20 bp, Sus scrofa
ttggcaaatgctcacatcag

SEQ ID NO: 89 - DNA, 20 bp, Sus scrofa
tggaccgacagagatatttt

SEQ ID NO: 90 - DNA, 20 bp, Sus scrofa
tttgccaaaaatatctctgt

SEQ ID NO: 91 - DNA, 20 bp, Sus scrofa
acacacacaaagtaggagaa

SEQ ID NO: 92 - DNA, 20 bp, Sus scrofa
cacacacacacacacaaagt

SEQ ID NO: 93 - DNA, 20 bp, Sus scrofa
ttgtgtgtgtgtgtgtgcgt

SEQ ID NO: 94 - DNA, 20 bp, Sus scrofa
tgtgtgtgtgtgtgtgcgtt

SEQ ID NO: 95 - DNA, 20 bp, Sus scrofa
gtgtgtgtgtgtgtgcgttg

SEQ ID NO: 96 - DNA, 20 bp, Sus scrofa
tgtgtgtgtgtgtgcgttgg

SEQ ID NO: 97 - DNA, 20 bp, Sus scrofa
gtgtgtgtgtgtgcgttggg

SEQ ID NO: 98 - DNA, 20 bp, Sus scrofa
tgtgtgtgtgcgttgggggg

SEQ ID NO: 99 - DNA, 20 bp, Sus scrofa
ttggggggaggcactttttt

SEQ ID NO: 100 - DNA, 20 bp, Sus scrofa
tggggggaggcacttttttt

SEQ ID NO: 101 - DNA, 20 bp, Sus scrofa
ggggggaggcactttttttg

SEQ ID NO: 102 - DNA, 20 bp, Sus scrofa
gggggaggcactttttttgg

SEQ ID NO: 103 - DNA, 20 bp, Sus scrofa
ggggaggcactttttttggg

SEQ ID NO: 104 - DNA, 20 bp, Sus scrofa
gggaggcactttttttgggg

SEQ ID NO: 105 - DNA, 20 bp, Sus scrofa
ggaggcactttttttggggg

SEQ ID NO: 106 - DNA, 20 bp, Sus scrofa
tttttttggggggggcgcct

SEQ ID NO: 107 - DNA, 20 bp, Sus scrofa
cccccaaacccacatctcct

SEQ ID NO: 108 - DNA, 20 bp, Sus scrofa
gggggggcgcctaggagatg

SEQ ID NO: 109 - DNA, 20 bp, Sus scrofa
ggggggcgcctaggagatgt

SEQ ID NO: 110 - DNA, 20 bp, Sus scrofa
gcgcctaggagatgtgggtt

SEQ ID NO: 111 - DNA, 20 bp, Sus scrofa
cgcctaggagatgtgggttt

SEQ ID NO: 112 - DNA, 20 bp, Sus scrofa
gcctaggagatgtgggtttg

SEQ ID NO: 113 - DNA, 20 bp, Sus scrofa
cctaggagatgtgggtttgg

SEQ ID NO: 114 - DNA, 20 bp, Sus scrofa
ggagatgtgggtttgggggt

SEQ ID NO: 115 - DNA, 20 bp, Sus scrofa
cggactgcaaatgaattgca

SEQ ID NO: 116 - DNA, 20 bp, Sus scrofa
ctgcaaatgaattgcaaggt

SEQ ID NO: 117 - DNA, 20 bp, Sus scrofa
tgcaaatgaattgcaaggtt

SEQ ID NO: 118 - DNA, 20 bp, Sus scrofa
gcaaatgaattgcaaggttg

SEQ ID NO: 119 - DNA, 20 bp, Sus scrofa
caaatgaattgcaaggttgg

SEQ ID NO: 120 - DNA, 20 bp, Sus scrofa
aaatgaattgcaaggttggg

SEQ ID NO: 121 - DNA, 20 bp, Sus scrofa
acagccagaaaatgatcgga

SEQ ID NO: 122 - DNA, 20 bp, Sus scrofa
ggcgacagccagaaaatgat

SEQ ID NO: 123 - DNA, 20 bp, Sus scrofa
aatgccatccgatcattttc

SEQ ID NO: 124 - DNA, 20 bp, Sus scrofa
tcacacaccaagggcagcgg

SEQ ID NO: 125 - DNA, 20 bp, Sus scrofa
tagtcacacaccaagggcag

SEQ ID NO: 126 - DNA, 20 bp, Sus scrofa
gctgtcgccgccgctgccct

SEQ ID NO: 127 - DNA, 20 bp, Sus scrofa
cacaggtagtcacacaccaa

SEQ ID NO: 128 - DNA, 20 bp, Sus scrofa
gcacaggtagtcacacacca

SEQ ID NO: 129 - DNA, 20 bp, Sus scrofa
acacgcgggagcacacgcac

SEQ ID NO: 130 - DNA, 20 bp, Sus scrofa
gcacccacactcgcacacgc

SEQ ID NO: 131 - DNA, 20 bp, Sus scrofa
cgcacccacactcgcacacg

SEQ ID NO: 132 - DNA, 20 bp, Sus scrofa
tgctcccgcgtgtgcgagtg

SEQ ID NO: 133 - DNA, 20 bp, Sus scrofa
gctcccgcgtgtgcgagtgt

SEQ ID NO: 134 - DNA, 20 bp, Sus scrofa
gcgtgcgagtgtgcacccat

SEQ ID NO: 135 - DNA, 20 bp, Sus scrofa
cgtgcgagtgtgcacccatc

SEQ ID NO: 136 - DNA, 20 bp, Sus scrofa
gtgcgagtgtgcacccatcg

SEQ ID NO: 137 - DNA, 20 bp, Sus scrofa
tgcgagtgtgcacccatcgg

SEQ ID NO: 138 - DNA, 20 bp, Sus scrofa
tgcgcccgctggcccccgat

SEQ ID NO: 139 - DNA, 20 bp, Sus scrofa
gtgcgcccgctggcccccga

SEQ ID NO: 140 - DNA, 20 bp, Sus scrofa
gtgcacccatcgggggccag

SEQ ID NO: 141 - DNA, 20 bp, Sus scrofa
tgcacccatcgggggccagc

SEQ ID NO: 142 - DNA, 20 bp, Sus scrofa
acccaaacgcgtgcgcccgc

SEQ ID NO: 143 - DNA, 20 bp, Sus scrofa
ggccagcgggcgcacgcgtt

SEQ ID NO: 144 - DNA, 20 bp, Sus scrofa
gccagcgggcgcacgcgttt

SEQ ID NO: 145 - DNA, 20 bp, Sus scrofa
gcgggcgcacgcgtttgggt

SEQ ID NO: 146 - DNA, 20 bp, Sus scrofa
cgtttgggtcggagagaatg

SEQ ID NO: 147 - DNA, 20 bp, Sus scrofa
acgcgagcagcgagctcaga

SEQ ID NO: 148 - DNA, 20 bp, Sus scrofa
cacgcgagcagcgagctcag

SEQ ID NO: 149 - DNA, 20 bp, Sus scrofa
ctgctcgcgtgactccgtct

SEQ ID NO: 150 - DNA, 20 bp, Sus scrofa
tgctcgcgtgactccgtcta

SEQ ID NO: 151 - DNA, 20 bp, Sus scrofa
gctcgcgtgactccgtctag

SEQ ID NO: 152 - DNA, 20 bp, Sus scrofa
tcgttaatctttcccctaga

SEQ ID NO: 153 - DNA, 20 bp, Sus scrofa
gtctaggggaaagattaacg

SEQ ID NO: 154 - DNA, 20 bp, Sus scrofa
tctaggggaaagattaacga

SEQ ID NO: 155 - DNA, 20 bp, Sus scrofa
aggggaaagattaacgaggg

SEQ ID NO: 156 - DNA, 20 bp, Sus scrofa
ggaaagattaacgagggagg

SEQ ID NO: 157 - DNA, 20 bp, Sus scrofa
aagattaacgagggaggagg

SEQ ID NO: 158 - DNA, 20 bp, Sus scrofa
taacgagggaggaggaggag

SEQ ID NO: 159 - DNA, 20 bp, Sus scrofa
aacgagggaggaggaggaga

SEQ ID NO: 160 - DNA, 20 bp, Sus scrofa
acgagggaggaggaggagag

SEQ ID NO: 161 - DNA, 20 bp, Sus scrofa
ggaggagaggggctgcctcc

SEQ ID NO: 162 - DNA, 20 bp, Sus scrofa
tttttgttgttaaatccagg

SEQ ID NO: 163 - DNA, 20 bp, Sus scrofa
ctttttttgttgttaaatcc

SEQ ID NO: 164 - DNA, 20 bp, Sus scrofa
ctggatttaacaacaaaaaa

SEQ ID NO: 165 - DNA, 20 bp, Sus scrofa
tggatttaacaacaaaaaaa

SEQ ID NO: 166 - DNA, 20 bp, Sus scrofa
ggatttaacaacaaaaaaag

SEQ ID NO: 167 - DNA, 20 bp, Sus scrofa
gatttaacaacaaaaaaagg

SEQ ID NO: 168 - DNA, 20 bp, Sus scrofa
gcgggaggggggaggaaggg

SEQ ID NO: 169 - DNA, 20 bp, Sus scrofa
cgcgggaggggggaggaagg

SEQ ID NO: 170 - DNA, 20 bp, Sus scrofa
gcgcgggaggggggaggaag

SEQ ID NO: 171 - DNA, 20 bp, Sus scrofa
ggcgcgggaggggggaggaa

SEQ ID NO: 172 - DNA, 20 bp, Sus scrofa
aggcgcgggaggggggagga

SEQ ID NO: 173 - DNA, 20 bp, Sus scrofa
gggaaggcgcgggagggggg

SEQ ID NO: 174 - DNA, 20 bp, Sus scrofa
agggggaaggcgcgggaggg

SEQ ID NO: 175 - DNA, 20 bp, Sus scrofa
gagggggaaggcgcgggagg

SEQ ID NO: 176 - DNA, 20 bp, Sus scrofa
ggagggggaaggcgcgggag

SEQ ID NO: 177 - DNA, 20 bp, Sus scrofa
gggagggggaaggcgcggga

SEQ ID NO: 178 - DNA, 20 bp, Sus scrofa
agggagggggaaggcgcggg

SEQ ID NO: 179 - DNA, 20 bp, Sus scrofa
gaaagggagggggaaggcgc

SEQ ID NO: 180 - DNA, 20 bp, Sus scrofa
agaaagggagggggaaggcg

SEQ ID NO: 181 - DNA, 20 bp, Sus scrofa
gagggagaaagggaggggga

SEQ ID NO: 182 - DNA, 20 bp, Sus scrofa
gagagagggagaaagggagg

SEQ ID NO: 183 - DNA, 20 bp, Sus scrofa
agagagagggagaaagggag

SEQ ID NO: 184 - DNA, 20 bp, Sus scrofa
gagagagagggagaaaggga

SEQ ID NO: 185 - DNA, 20 bp, Sus scrofa
ggagagagagggagaaaggg

SEQ ID NO: 186 - DNA, 20 bp, Sus scrofa
gacggagagagagggagaaa

SEQ ID NO: 187 - DNA, 20 bp, Sus scrofa
agacggagagagagggagaa

SEQ ID NO: 188 - DNA, 20 bp, Sus scrofa
gagagagagacggagagaga

SEQ ID NO: 189 - DNA, 20 bp, Sus scrofa
agagagagagacggagagag

SEQ ID NO: 190 - DNA, 20 bp, Sus scrofa
gagagagagagagagagaga

SEQ ID NO: 191 - DNA, 20 bp, Sus scrofa
cgcacacacacaataagttt

SEQ ID NO: 192 - DNA, 20 bp, Sus scrofa
gcacacacacaataagtttt

SEQ ID NO: 193 - DNA, 20 bp, Sus scrofa
agttttgggcttcgcgagtc

SEQ ID NO: 194 - DNA, 20 bp, Sus scrofa
acatttatcagaaactaaac

SEQ ID NO: 195 - DNA, 20 bp, Sus scrofa
ggtttagtttctgataaatg

SEQ ID NO: 196 - DNA, 20 bp, Sus scrofa
gtttagtttctgataaatgt

SEQ ID NO: 197 - DNA, 20 bp, Sus scrofa
tttctgataaatgtgggccg

SEQ ID NO: 198 - DNA, 20 bp, Sus scrofa
tgcgctctccccaggggcct

SEQ ID NO: 199 - DNA, 20 bp, Sus scrofa
taaatgtgggccgaggcccc

SEQ ID NO: 200 - DNA, 20 bp, Sus scrofa
aaatgtgggccgaggcccct

SEQ ID NO: 201 - DNA, 20 bp, Sus scrofa
aatgtgggccgaggcccctg

SEQ ID NO: 202 - DNA, 20 bp, Sus scrofa
tccccatgcgctctccccag

SEQ ID NO: 203 - DNA, 20 bp, Sus scrofa
ctccccatgcgctctcccca

SEQ ID NO: 204 - DNA, 20 bp, Sus scrofa
cctccccatgcgctctcccc

SEQ ID NO: 205 - DNA, 20 bp, Sus scrofa
aggcccctggggagagcgca

SEQ ID NO: 206 - DNA, 20 bp, Sus scrofa
ggcccctggggagagcgcat

SEQ ID NO: 207 - DNA, 20 bp, Sus scrofa
gcccctggggagagcgcatg

SEQ ID NO: 208 - DNA, 20 bp, Sus scrofa
cctggggagagcgcatgggg

SEQ ID NO: 209 - DNA, 20 bp, Sus scrofa
ctggggagagcgcatgggga

SEQ ID NO: 210 - DNA, 20 bp, Sus scrofa
tggggagagcgcatggggag

SEQ ID NO: 211 - DNA, 20 bp, Sus scrofa
ggggagagcgcatggggagg

SEQ ID NO: 212 - DNA, 20 bp, Sus scrofa
gcatggggagggggctgcag

SEQ ID NO: 213 - DNA, 20 bp, Sus scrofa
ggagggggctgcagcggagt

SEQ ID NO: 214 - DNA, 20 bp, Sus scrofa
gagggggctgcagcggagtt

SEQ ID NO: 215 - DNA, 20 bp, Sus scrofa
ggctgcagcggagttgggaa

SEQ ID NO: 216 - DNA, 20 bp, Sus scrofa
ttcatttctttgcagtgatg

SEQ ID NO: 217 - DNA, 20 bp, Sus scrofa
tgcagtgatgaggcgagaga

SEQ ID NO: 218 - DNA, 20 bp, Sus scrofa
gcagtgatgaggcgagagac

SEQ ID NO: 219 - DNA, 20 bp, Sus scrofa
cagtgatgaggcgagagacg

SEQ ID NO: 220 - DNA, 20 bp, Sus scrofa
agtgatgaggcgagagacgg

SEQ ID NO: 221 - DNA, 20 bp, Sus scrofa
acactacaaagttacaaata

SEQ ID NO: 222 - DNA, 20 bp, Sus scrofa
aagggagggagggagagaaa

SEQ ID NO: 223 - DNA, 20 bp, Sus scrofa
aaagggagggagggagagaa

SEQ ID NO: 224 - DNA, 20 bp, Sus scrofa
gaggcagagaaagggaggga

SEQ ID NO: 225 - DNA, 20 bp, Sus scrofa
ggaggcagagaaagggaggg

SEQ ID NO: 226 - DNA, 20 bp, Sus scrofa
aaaggaggcagagaaaggga

SEQ ID NO: 227 - DNA, 20 bp, Sus scrofa
gaaaggaggcagagaaaggg

SEQ ID NO: 228 - DNA, 20 bp, Sus scrofa
gaggaaaggaggcagagaaa

SEQ ID NO: 229 - DNA, 20 bp, Sus scrofa
agaggaaaggaggcagagaa

SEQ ID NO: 230 - DNA, 20 bp, Sus scrofa
aaagaggaggagaggaaagg

SEQ ID NO: 231 - DNA, 20 bp, Sus scrofa
gagaaagaggaggagaggaa

SEQ ID NO: 232 - DNA, 20 bp, Sus scrofa
tgagggagaaagaggaggag

SEQ ID NO: 233 - DNA, 20 bp, Sus scrofa
aagagtgagggagaaagagg

SEQ ID NO: 234 - DNA, 20 bp, Sus scrofa
ggaaagagtgagggagaaag

SEQ ID NO: 235 - DNA, 20 bp, Sus scrofa
aggtggggtggaaagagtga

SEQ ID NO: 236 - DNA, 20 bp, Sus scrofa
aaggtggggtggaaagagtg

SEQ ID NO: 237 - DNA, 20 bp, Sus scrofa
catctggcccgaaggtgggg

SEQ ID NO: 238 - DNA, 20 bp, Sus scrofa
cactctttccaccccacctt

SEQ ID NO: 239 - DNA, 20 bp, Sus scrofa
cagcatctggcccgaaggtg

SEQ ID NO: 240 - DNA, 20 bp, Sus scrofa
actctttccaccccaccttc

SEQ ID NO: 241 - DNA, 20 bp, Sus scrofa
tcagcatctggcccgaaggt

SEQ ID NO: 242 - DNA, 20 bp, Sus scrofa
atcagcatctggcccgaagg

SEQ ID NO: 243 - DNA, 20 bp, Sus scrofa
aacatcagcatctggcccga

SEQ ID NO: 244 - DNA, 20 bp, Sus scrofa
aaggaagaaacatcagcatc

SEQ ID NO: 245 - DNA, 20 bp, Sus scrofa
tatcttcccttcagaaggaa

SEQ ID NO: 246 - DNA, 20 bp, Sus scrofa
gtttcttcctttccttctga

SEQ ID NO: 247 - DNA, 20 bp, Sus scrofa
tttcttcctttccttctgaa

SEQ ID NO: 248 - DNA, 20 bp, Sus scrofa
caatttatcttcccttcaga

SEQ ID NO: 249 - DNA, 20 bp, Sus scrofa
cttctgaagggaagataaat

SEQ ID NO: 250 - DNA, 20 bp, Sus scrofa
agggaagataaattggaaga

SEQ ID NO: 251 - DNA, 20 bp, Sus scrofa
gggaagataaattggaagaa

SEQ ID NO: 252 - DNA, 20 bp, Sus scrofa
ggaagataaattggaagaag

SEQ ID NO: 253 - DNA, 20 bp, Sus scrofa
gaagataaattggaagaagg

SEQ ID NO: 254 - DNA, 20 bp, Sus scrofa
aagataaattggaagaaggg

SEQ ID NO: 255 - DNA, 20 bp, Sus scrofa
agataaattggaagaagggg

SEQ ID NO: 256 - DNA, 20 bp, Sus scrofa
gataaattggaagaaggggg

SEQ ID NO: 257 - DNA, 20 bp, Sus scrofa
aaattggaagaagggggggg

SEQ ID NO: 258 - DNA, 20 bp, Sus scrofa
aattggaagaagggggggga

SEQ ID NO: 259 - DNA, 20 bp, Sus scrofa
agggattttcgaacgtgcaa

SEQ ID NO: 260 - DNA, 20 bp, Sus scrofa
gcgcgaggtggggaggcgcg

SEQ ID NO: 261 - DNA, 20 bp, Sus scrofa
cgcgcgaggtggggaggcgc

SEQ ID NO: 262 - DNA, 20 bp, Sus scrofa
tcgcgcgaggtggggaggcg

SEQ ID NO: 263 - DNA, 20 bp, Sus scrofa
agcgatcgcgcgaggtgggg

SEQ ID NO: 264 - DNA, 20 bp, Sus scrofa
agtagcgatcgcgcgaggtg

SEQ ID NO: 265 - DNA, 20 bp, Sus scrofa
cagtagcgatcgcgcgaggt

SEQ ID NO: 266 - DNA, 20 bp, Sus scrofa
gcagtagcgatcgcgcgagg

SEQ ID NO: 267 - DNA, 20 bp, Sus scrofa
cttgcagtagcgatcgcgcg

SEQ ID NO: 268 - DNA, 20 bp, Sus scrofa
cgctactgcaagttacccaa

SEQ ID NO: 269 - DNA, 20 bp, Sus scrofa
aggacctggacttagccttt

SEQ ID NO: 270 - DNA, 20 bp, Sus scrofa
gaggacctggacttagcctt

SEQ ID NO: 271 - DNA, 20 bp, Sus scrofa
gttacccaaaggctaagtcc

SEQ ID NO: 272 - DNA, 20 bp, Sus scrofa
caagggggagagggaggacc

SEQ ID NO: 273 - DNA, 20 bp, Sus scrofa
aaggagcaagggggagaggg

SEQ ID NO: 274 - DNA, 20 bp, Sus scrofa
tggaaggagcaagggggaga

SEQ ID NO: 275 - DNA, 20 bp, Sus scrofa
ctggaaggagcaagggggag

SEQ ID NO: 276 - DNA, 20 bp, Sus scrofa
ggaggctggaaggagcaagg

SEQ ID NO: 277 - DNA, 20 bp, Sus scrofa
gggaggctggaaggagcaag

SEQ ID NO: 278 - DNA, 20 bp, Sus scrofa
agggaggctggaaggagcaa

SEQ ID NO: 279 - DNA, 20 bp, Sus scrofa
tagggaggctggaaggagca

SEQ ID NO: 280 - DNA, 20 bp, Sus scrofa
ggcaccttagggaggctgga

SEQ ID NO: 281 - DNA, 20 bp, Sus scrofa
ggctggcaccttagggaggc

SEQ ID NO: 282 - DNA, 20 bp, Sus scrofa
tgctccttccagcctcccta

SEQ ID NO: 283 - DNA, 20 bp, Sus scrofa
cgaaggctggcaccttaggg

SEQ ID NO: 284 - DNA, 20 bp, Sus scrofa
gctcgaaggctggcacctta

SEQ ID NO: 285 - DNA, 20 bp, Sus scrofa
ggctcgaaggctggcacctt

SEQ ID NO: 286 - DNA, 20 bp, Sus scrofa
gggcgccacggctcgaaggc

SEQ ID NO: 287 - DNA, 20 bp, Sus scrofa
cggggggcgccacggctcga

SEQ ID NO: 288 - DNA, 20 bp, Sus scrofa
aggtgccagccttcgagccg

SEQ ID NO: 289 - DNA, 20 bp, Sus scrofa
gtcggtgccggggggcgcca

SEQ ID NO: 290 - DNA, 20 bp, Sus scrofa
cttcgagccgtggcgccccc

SEQ ID NO: 291 - DNA, 20 bp, Sus scrofa
ggccaggggtcggtgccggg

SEQ ID NO: 292 - DNA, 20 bp, Sus scrofa
aggccaggggtcggtgccgg

SEQ ID NO: 293 - DNA, 20 bp, Sus scrofa
caggccaggggtcggtgccg

SEQ ID NO: 294 - DNA, 20 bp, Sus scrofa
acaggccaggggtcggtgcc

SEQ ID NO: 295 - DNA, 20 bp, Sus scrofa
gacaggccaggggtcggtgc

SEQ ID NO: 296 - DNA, 20 bp, Sus scrofa
cgccccccggcaccgacccc

SEQ ID NO: 297 - DNA, 20 bp, Sus scrofa
agacaagacaggccaggggt

SEQ ID NO: 298 - DNA, 20 bp, Sus scrofa
ctagagacaagacaggccag

SEQ ID NO: 299 - DNA, 20 bp, Sus scrofa
cctagagacaagacaggcca

SEQ ID NO: 300 - DNA, 20 bp, Sus scrofa
ccctagagacaagacaggcc

SEQ ID NO: 301 - DNA, 20 bp, Sus scrofa
gcccaccctagagacaagac

SEQ ID NO: 302 - DNA, 20 bp, Sus scrofa
ccctggcctgtcttgtctct

SEQ ID NO: 303 - DNA, 20 bp, Sus scrofa
cctggcctgtcttgtctcta

SEQ ID NO: 304 - DNA, 20 bp, Sus scrofa
ggcctgtcttgtctctaggg

SEQ ID NO: 305 - DNA, 20 bp, Sus scrofa
gcctgtcttgtctctagggt

SEQ ID NO: 306 - DNA, 20 bp, Sus scrofa
tgtctctagggtgggctcct

SEQ ID NO: 307 - DNA, 20 bp, Sus scrofa
ccgtcgccgaatggctgcca

SEQ ID NO: 308 - DNA, 20 bp, Sus scrofa
tgggctccttggcagccatt

SEQ ID NO: 309 - DNA, 20 bp, Sus scrofa
tttattaacccgtcgccgaa

SEQ ID NO: 310 - DNA, 20 bp, Sus scrofa
ccttggcagccattcggcga

SEQ ID NO: 311 - DNA, 20 bp, Sus scrofa
cttggcagccattcggcgac

SEQ ID NO: 312 - DNA, 20 bp, Sus scrofa
ttcggcgacgggttaataaa

SEQ ID NO: 313 - DNA, 20 bp, Sus scrofa
tcggcgacgggttaataaat

SEQ ID NO: 314 - DNA, 20 bp, Sus scrofa
gacgggttaataaatgggcc

SEQ ID NO: 315 - DNA, 20 bp, Sus scrofa
acgggttaataaatgggccc

SEQ ID NO: 316 - DNA, 20 bp, Sus scrofa
gcgtcctgacaaagtttccc

SEQ ID NO: 317 - DNA, 20 bp, Sus scrofa
cgcgtcctgacaaagtttcc

SEQ ID NO: 318 - DNA, 20 bp, Sus scrofa
tgggcccgggaaactttgtc

SEQ ID NO: 319 - DNA, 20 bp, Sus scrofa
ggacgcgagctgcccagagc

SEQ ID NO: 320 - DNA, 20 bp, Sus scrofa
ccaccacgggcaccagctct

SEQ ID NO: 321 - DNA, 20 bp, Sus scrofa
cccaccacgggcaccagctc

SEQ ID NO: 322 - DNA, 20 bp, Sus scrofa
ctgcccagagctggtgcccg

SEQ ID NO: 323 - DNA, 20 bp, Sus scrofa
cccagagctggtgcccgtgg

SEQ ID NO: 324 - DNA, 20 bp, Sus scrofa
ccagagctggtgcccgtggt

SEQ ID NO: 325 - DNA, 20 bp, Sus scrofa
acccagccaatacccaccac

SEQ ID NO: 326 - DNA, 20 bp, Sus scrofa
gacccagccaatacccacca

SEQ ID NO: 327 - DNA, 20 bp, Sus scrofa
ctggtgcccgtggtgggtat

SEQ ID NO: 328 - DNA, 20 bp, Sus scrofa
tgcccgtggtgggtattggc

SEQ ID NO: 329 - DNA, 20 bp, Sus scrofa
gcccgtggtgggtattggct

SEQ ID NO: 330 - DNA, 20 bp, Sus scrofa
ctgttatgcccgcataaatc

SEQ ID NO: 331 - DNA, 20 bp, Sus scrofa
tggctgggtccagatttatg

SEQ ID NO: 332 - DNA, 20 bp, Sus scrofa
ggctgggtccagatttatgc

SEQ ID NO: 333 - DNA, 20 bp, Sus scrofa
gcataacagacacgcagctc

SEQ ID NO: 334 - DNA, 20 bp, Sus scrofa
cataacagacacgcagctcc

SEQ ID NO: 335 - DNA, 20 bp, Sus scrofa
acagacacgcagctccggga

SEQ ID NO: 336 - DNA, 20 bp, Sus scrofa
cagacacgcagctccgggat

SEQ ID NO: 337 - DNA, 20 bp, Sus scrofa
gggaaggcaaactcccatcc

SEQ ID NO: 338 - DNA, 20 bp, Sus scrofa
aatcaataacggcgacggga

SEQ ID NO: 339 - DNA, 20 bp, Sus scrofa
gcccaatcaataacggcgac

SEQ ID NO: 340 - DNA, 20 bp, Sus scrofa
tgcccaatcaataacggcga

SEQ ID NO: 341 - DNA, 20 bp, Sus scrofa
cgcctctgcccaatcaataa

SEQ ID NO: 342 - DNA, 20 bp, Sus scrofa
ttcccgtcgccgttattgat

SEQ ID NO: 343 - DNA, 20 bp, Sus scrofa
tcccgtcgccgttattgatt

SEQ ID NO: 344 - DNA, 20 bp, Sus scrofa
cgccgttattgattgggcag

SEQ ID NO: 345 - DNA, 20 bp, Sus scrofa
attgggcagaggcgcgagta

SEQ ID NO: 346 - DNA, 20 bp, Sus scrofa
agaggcgcgagtacggccag

SEQ ID NO: 347 - DNA, 20 bp, Sus scrofa
ccatccgtgtaagtttcctc

SEQ ID NO: 348 - DNA, 20 bp, Sus scrofa
acggccagaggaaacttaca

SEQ ID NO: 349 - DNA, 20 bp, Sus scrofa
ccagaggaaacttacacgga

SEQ ID NO: 350 - DNA, 20 bp, Sus scrofa
cagaggaaacttacacggat

SEQ ID NO: 351 - DNA, 20 bp, Sus scrofa
aacttacacggatgggaacc

SEQ ID NO: 352 - DNA, 20 bp, Sus scrofa
ttacacggatgggaacccgg

SEQ ID NO: 353 - DNA, 20 bp, Sus scrofa
gggctttggccagagcctcc

SEQ ID NO: 354 - DNA, 20 bp, Sus scrofa
tgggctttggccagagcctc

SEQ ID NO: 355 - DNA, 20 bp, Sus scrofa
ggatgggaacccggaggctc

SEQ ID NO: 356 - DNA, 20 bp, Sus scrofa
ccctccttaggggtgggctt

SEQ ID NO: 357 - DNA, 20 bp, Sus scrofa
cctttcccctccttaggggt

SEQ ID NO: 358 - DNA, 20 bp, Sus scrofa
ctggccaaagcccaccccta

SEQ ID NO: 359 - DNA, 20 bp, Sus scrofa
acctttcccctccttagggg

SEQ ID NO: 360 - DNA, 20 bp, Sus scrofa
gccaaagcccacccctaagg

SEQ ID NO: 361 - DNA, 20 bp, Sus scrofa
ctcacctttcccctccttag

SEQ ID NO: 362 - DNA, 20 bp, Sus scrofa
ccaaagcccacccctaagga

SEQ ID NO: 363 - DNA, 20 bp, Sus scrofa
cctcacctttcccctcctta

SEQ ID NO: 364 - DNA, 20 bp, Sus scrofa
caaagcccacccctaaggag

SEQ ID NO: 365 - DNA, 20 bp, Sus scrofa
ccctcacctttcccctcctt

SEQ ID NO: 366 - DNA, 20 bp, Sus scrofa
cccacccctaaggaggggaa

SEQ ID NO: 367 - DNA, 20 bp, Sus scrofa
ccctaaggaggggaaaggtg

SEQ ID NO: 368 - DNA, 20 bp, Sus scrofa
cctaaggaggggaaaggtga

SEQ ID NO: 369 - DNA, 20 bp, Sus scrofa
aaggaggggaaaggtgaggg

SEQ ID NO: 370 - DNA, 20 bp, Sus scrofa
aggaggggaaaggtgagggt

SEQ ID NO: 371 - DNA, 20 bp, Sus scrofa
agggagacagaaataaaaac

SEQ ID NO: 372 - DNA, 20 bp, Sus scrofa
gagggagacagaaataaaaa

SEQ ID NO: 373 - DNA, 20 bp, Sus scrofa
ataaaacactgaaagcgaga

SEQ ID NO: 374 - DNA, 20 bp, Sus scrofa
cataaaacactgaaagcgag

SEQ ID NO: 375 - DNA, 20 bp, Sus scrofa
tttcagtgttttatgtgagt

SEQ ID NO: 376 - DNA, 20 bp, Sus scrofa
cagtgttttatgtgagttgg

SEQ ID NO: 377 - DNA, 20 bp, Sus scrofa
tatgtgagttggcggctcag

SEQ ID NO: 378 - DNA, 20 bp, Sus scrofa
gtgagttggcggctcagcgg

SEQ ID NO: 379 - DNA, 20 bp, Sus scrofa
cggctcagcggaggagaccc

SEQ ID NO: 380 - DNA, 20 bp, Sus scrofa
ggctcagcggaggagaccca

SEQ ID NO: 381 - DNA, 20 bp, Sus scrofa
agcggaggagacccagggtc

SEQ ID NO: 382 - DNA, 20 bp, Sus scrofa
gcgtctccaccccagaccct

SEQ ID NO: 383 - DNA, 20 bp, Sus scrofa
gcggaggagacccagggtct

SEQ ID NO: 384 - DNA, 20 bp, Sus scrofa
agcgtctccaccccagaccc

SEQ ID NO: 385 - DNA, 20 bp, Sus scrofa
cggaggagacccagggtctg

SEQ ID NO: 386 - DNA, 20 bp, Sus scrofa
aggagacccagggtctgggg

SEQ ID NO: 387 - DNA, 20 bp, Sus scrofa
agggtctggggtggagacgc

SEQ ID NO: 388 - DNA, 20 bp, Sus scrofa
ggaggtgccacgagggcagt

SEQ ID NO: 389 - DNA, 20 bp, Sus scrofa
acgctggccgactgccctcg

SEQ ID NO: 390 - DNA, 20 bp, Sus scrofa
tgtcccgggaggtgccacga

SEQ ID NO: 391 - DNA, 20 bp, Sus scrofa
ttgtcccgggaggtgccacg

SEQ ID NO: 392 - DNA, 20 bp, Sus scrofa
actgccctcgtggcacctcc

SEQ ID NO: 393 - DNA, 20 bp, Sus scrofa
ctgccctcgtggcacctccc

SEQ ID NO: 394 - DNA, 20 bp, Sus scrofa
cgcgctccgcttgtcccggg

SEQ ID NO: 395 - DNA, 20 bp, Sus scrofa
gcccgcgctccgcttgtccc

SEQ ID NO: 396 - DNA, 20 bp, Sus scrofa
cgcccgcgctccgcttgtcc

SEQ ID NO: 397 - DNA, 20 bp, Sus scrofa
gtggcacctcccgggacaag

SEQ ID NO: 398 - DNA, 20 bp, Sus scrofa
ctcccgggacaagcggagcg

SEQ ID NO: 399 - DNA, 20 bp, Sus scrofa
tcccgggacaagcggagcgc

SEQ ID NO: 400 - DNA, 20 bp, Sus scrofa
cgggacaagcggagcgcggg

SEQ ID NO: 401 - DNA, 20 bp, Sus scrofa
gacaagcggagcgcgggcgg

SEQ ID NO: 402 - DNA, 20 bp, Sus scrofa
ccacccgggctgggggtgcg

SEQ ID NO: 403 - DNA, 20 bp, Sus scrofa
gccacccgggctgggggtgc

SEQ ID NO: 404 - DNA, 20 bp, Sus scrofa
ggccacccgggctgggggtg

SEQ ID NO: 405 - DNA, 20 bp, Sus scrofa
ggaaccccgcacccccagcc

SEQ ID NO: 406 - DNA, 20 bp, Sus scrofa
accccggccacccgggctgg

SEQ ID NO: 407 - DNA, 20 bp, Sus scrofa
gaaccccgcacccccagccc

SEQ ID NO: 408 - DNA, 20 bp, Sus scrofa
aaccccggccacccgggctg

SEQ ID NO: 409 - DNA, 20 bp, Sus scrofa
gaaccccggccacccgggct

SEQ ID NO: 410 - DNA, 20 bp, Sus scrofa
ggaaccccggccacccgggc

SEQ ID NO: 411 - DNA, 20 bp, Sus scrofa
ccccgcacccccagcccggg

SEQ ID NO: 412 - DNA, 20 bp, Sus scrofa
ctgtggaaccccggccaccc

SEQ ID NO: 413 - DNA, 20 bp, Sus scrofa
gcacccccagcccgggtggc

SEQ ID NO: 414 - DNA, 20 bp, Sus scrofa
tctgtggaaccccggccacc

SEQ ID NO: 415 - DNA, 20 bp, Sus scrofa
cacccccagcccgggtggcc

SEQ ID NO: 416 - DNA, 20 bp, Sus scrofa
acccccagcccgggtggccg

SEQ ID NO: 417 - DNA, 20 bp, Sus scrofa
ctcccaactctgtggaaccc

SEQ ID NO: 418 - DNA, 20 bp, Sus scrofa
tggccggggttccacagagt

SEQ ID NO: 419 - DNA, 20 bp, Sus scrofa
tacccaaactcccaactctg

SEQ ID NO: 420 - DNA, 20 bp, Sus scrofa
ggccggggttccacagagtt

SEQ ID NO: 421 - DNA, 20 bp, Sus scrofa
gttccacagagttgggagtt

SEQ ID NO: 422 - DNA, 20 bp, Sus scrofa
ttccacagagttgggagttt

SEQ ID NO: 423 - DNA, 20 bp, Sus scrofa
taacgggctgaagcggcgac

SEQ ID NO: 424 - DNA, 20 bp, Sus scrofa
cgggttttaacgggctgaag

SEQ ID NO: 425 - DNA, 20 bp, Sus scrofa
ccagggattcgggttttaac

SEQ ID NO: 426 - DNA, 20 bp, Sus scrofa
gccagggattcgggttttaa

SEQ ID NO: 427 - DNA, 20 bp, Sus scrofa
cctgcctccgccagggattc

SEQ ID NO: 428 - DNA, 20 bp, Sus scrofa
cccgttaaaacccgaatccc

SEQ ID NO: 429 - DNA, 20 bp, Sus scrofa
gcctgcctccgccagggatt

SEQ ID NO: 430 - DNA, 20 bp, Sus scrofa
gttaaaacccgaatccctgg

SEQ ID NO: 431 - DNA, 20 bp, Sus scrofa
aaaacccgaatccctggcgg

SEQ ID NO: 432 - DNA, 20 bp, Sus scrofa
agcaaggcctgcctccgcca

SEQ ID NO: 433 - DNA, 20 bp, Sus scrofa
aagcaaggcctgcctccgcc

SEQ ID NO: 434 - DNA, 20 bp, Sus scrofa
cccgaatccctggcggaggc

SEQ ID NO: 435 - DNA, 20 bp, Sus scrofa
actagagaaaagaggaagca

SEQ ID NO: 436 - DNA, 20 bp, Sus scrofa
ggggaggaactagagaaaag

SEQ ID NO: 437 - DNA, 20 bp, Sus scrofa
gtctcactcaggtttggggg

SEQ ID NO: 438 - DNA, 20 bp, Sus scrofa
aaagtctcactcaggtttgg

SEQ ID NO: 439 - DNA, 20 bp, Sus scrofa
aaaagtctcactcaggtttg

SEQ ID NO: 440 - DNA, 20 bp, Sus scrofa
caaaagtctcactcaggttt

SEQ ID NO: 441 - DNA, 20 bp, Sus scrofa
tcaaaagtctcactcaggtt

SEQ ID NO: 442 - DNA, 20 bp, Sus scrofa
tgttttcaaaagtctcactc

SEQ ID NO: 443 - DNA, 20 bp, Sus scrofa
tatgatgggggggcacaaaa

SEQ ID NO: 444 - DNA, 20 bp, Sus scrofa
acagctgcgttatgatgggg

SEQ ID NO: 445 - DNA, 20 bp, Sus scrofa
cacagctgcgttatgatggg

SEQ ID NO: 446 - DNA, 20 bp, Sus scrofa
ccacagctgcgttatgatgg

SEQ ID NO: 447 - DNA, 20 bp, Sus scrofa
tccacagctgcgttatgatg

SEQ ID NO: 448 - DNA, 20 bp, Sus scrofa
gtccacagctgcgttatgat

SEQ ID NO: 449 - DNA, 20 bp, Sus scrofa
agtccacagctgcgttatga

SEQ ID NO: 450 - DNA, 20 bp, Sus scrofa
cccccatcataacgcagctg

SEQ ID NO: 451 - DNA, 20 bp, Sus scrofa
tgtcgacgtgcagtgcctta

SEQ ID NO: 452 - DNA, 20 bp, Sus scrofa
tccccgccctgcgcgccata

SEQ ID NO: 453 - DNA, 20 bp, Sus scrofa
tgcagtgccttatggcgcgc

SEQ ID NO: 454 - DNA, 20 bp, Sus scrofa
gcagtgccttatggcgcgca

SEQ ID NO: 455 - DNA, 20 bp, Sus scrofa
gtgccttatggcgcgcaggg

SEQ ID NO: 456 - DNA, 20 bp, Sus scrofa
tgccttatggcgcgcagggc

SEQ ID NO: 457 - DNA, 20 bp, Sus scrofa
gccttatggcgcgcagggcg

SEQ ID NO: 458 - DNA, 20 bp, Sus scrofa
ttatggcgcgcagggcgggg

SEQ ID NO: 459 - DNA, 20 bp, Sus scrofa
tatggcgcgcagggcgggga

SEQ ID NO: 460 - DNA, 20 bp, Sus scrofa
atggcgcgcagggcggggag

SEQ ID NO: 461 - DNA, 20 bp, Sus scrofa
tggcgcgcagggcggggagg

SEQ ID NO: 462 - DNA, 20 bp, Sus scrofa
cgcgcagggcggggaggggg

SEQ ID NO: 463 - DNA, 20 bp, Sus scrofa
gcagggcggggagggggtgg

SEQ ID NO: 464 - DNA, 20 bp, Sus scrofa
gggcggggagggggtggcgg

SEQ ID NO: 465 - DNA, 20 bp, Sus scrofa
ggcggggagggggtggcgga

SEQ ID NO: 466 - DNA, 20 bp, Sus scrofa
ggggagggggtggcggaggg

SEQ ID NO: 467 - DNA, 20 bp, Sus scrofa
gggagggggtggcggaggga

SEQ ID NO: 468 - DNA, 20 bp, Sus scrofa
ggagggggtggcggagggag

SEQ ID NO: 469 - DNA, 20 bp, Sus scrofa
gggggtggcggagggagggg

SEQ ID NO: 470 - DNA, 20 bp, Sus scrofa
ggggtggcggagggagggga

SEQ ID NO: 471 - DNA, 20 bp, Sus scrofa
gggtggcggagggaggggag

SEQ ID NO: 472 - DNA, 20 bp, Sus scrofa
ggggaggggttgcccgcccg

SEQ ID NO: 473 - DNA, 20 bp, Sus scrofa
aaactcctgcgtcctcgggc

SEQ ID NO: 474 - DNA, 20 bp, Sus scrofa
gaaactcctgcgtcctcggg

SEQ ID NO: 475 - DNA, 20 bp, Sus scrofa
gcggaaactcctgcgtcctc

SEQ ID NO: 476 - DNA, 20 bp, Sus scrofa
cgcggaaactcctgcgtcct

SEQ ID NO: 477 - DNA, 20 bp, Sus scrofa
ggttgcccgcccgaggacgc

SEQ ID NO: 478 - DNA, 20 bp, Sus scrofa
aaccgccggcaaattgttcg

SEQ ID NO: 479 - DNA, 20 bp, Sus scrofa
agtttccgcgaacaatttgc

SEQ ID NO: 480 - DNA, 20 bp, Sus scrofa
ttccgcgaacaatttgccgg

SEQ ID NO: 481 - DNA, 20 bp, Sus scrofa
gccagagaaaggcaaaccgc

SEQ ID NO: 482 - DNA, 20 bp, Sus scrofa
gccggcggtttgcctttctc

SEQ ID NO: 483 - DNA, 20 bp, Sus scrofa
ggatgaaaccggccagagaa

SEQ ID NO: 484 - DNA, 20 bp, Sus scrofa
gcggtttgcctttctctggc

SEQ ID NO: 485 - DNA, 20 bp, Sus scrofa
ggtccaagctgggatgaaac

SEQ ID NO: 486 - DNA, 20 bp, Sus scrofa
tggccggtttcatcccagct

SEQ ID NO: 487 - DNA, 20 bp, Sus scrofa
tccggctccgggtccaagct

SEQ ID NO: 488 - DNA, 20 bp, Sus scrofa
ctccggctccgggtccaagc

SEQ ID NO: 489 - DNA, 20 bp, Sus scrofa
gtttcatcccagcttggacc

SEQ ID NO: 490 - DNA, 20 bp, Sus scrofa
tcccagcttggacccggagc

SEQ ID NO: 491 - DNA, 20 bp, Sus scrofa
ccccccagtcctccggctcc

SEQ ID NO: 492 - DNA, 20 bp, Sus scrofa
gccccccagtcctccggctc

SEQ ID NO: 493 - DNA, 20 bp, Sus scrofa
cagcttggacccggagccgg

SEQ ID NO: 494 - DNA, 20 bp, Sus scrofa
tggacccggagccggaggac

SEQ ID NO: 495 - DNA, 20 bp, Sus scrofa
cacccagccccccagtcctc

SEQ ID NO: 496 - DNA, 20 bp, Sus scrofa
ggacccggagccggaggact

SEQ ID NO: 497 - DNA, 20 bp, Sus scrofa
gacccggagccggaggactg

SEQ ID NO: 498 - DNA, 20 bp, Sus scrofa
acccggagccggaggactgg

SEQ ID NO: 499 - DNA, 20 bp, Sus scrofa
cccggagccggaggactggg

SEQ ID NO: 500 - DNA, 20 bp, Sus scrofa
gagccggaggactggggggc

SEQ ID NO: 501 - DNA, 20 bp, Sus scrofa
agccggaggactggggggct

SEQ ID NO: 502 - DNA, 20 bp, Sus scrofa
gaggactggggggctgggtg

SEQ ID NO: 503 - DNA, 20 bp, Sus scrofa
tggggggctgggtgtggtga

SEQ ID NO: 504 - DNA, 20 bp, Sus scrofa
ggggggctgggtgtggtgat

SEQ ID NO: 505 - DNA, 20 bp, Sus scrofa
gggggctgggtgtggtgatg

SEQ ID NO: 506 - DNA, 20 bp, Sus scrofa
ggggctgggtgtggtgatgg

SEQ ID NO: 507 - DNA, 20 bp, Sus scrofa
gctgggtgtggtgatggggg

SEQ ID NO: 508 - DNA, 20 bp, Sus scrofa
ctgggtgtggtgatggggga

SEQ ID NO: 509 - DNA, 20 bp, Sus scrofa
tgggtgtggtgatgggggag

SEQ ID NO: 510 - DNA, 20 bp, Sus scrofa
gggtgtggtgatgggggagg

SEQ ID NO: 511 - DNA, 20 bp, Sus scrofa
gggggagggggcccgagccg

SEQ ID NO: 512 - DNA, 20 bp, Sus scrofa
acgcgggaagcccgcggctc

SEQ ID NO: 513 - DNA, 20 bp, Sus scrofa
ggggagggggcccgagccgc

SEQ ID NO: 514 - DNA, 20 bp, Sus scrofa
tacgcgggaagcccgcggct

SEQ ID NO: 515 - DNA, 20 bp, Sus scrofa
gaaagtacgcgggaagcccg

SEQ ID NO: 516 - DNA, 20 bp, Sus scrofa
ggggcttccggaaagtacgc

SEQ ID NO: 517 - DNA, 20 bp, Sus scrofa
gggggcttccggaaagtacg

SEQ ID NO: 518 - DNA, 20 bp, Sus scrofa
cgggcttcccgcgtactttc

SEQ ID NO: 519 - DNA, 20 bp, Sus scrofa
ccctccgcacggggggcttc

SEQ ID NO: 520 - DNA, 20 bp, Sus scrofa
ctttccggaagccccccgtg

SEQ ID NO: 521 - DNA, 20 bp, Sus scrofa
cccttccccctccgcacggg

SEQ ID NO: 522 - DNA, 20 bp, Sus scrofa
gcccttccccctccgcacgg

SEQ ID NO: 523 - DNA, 20 bp, Sus scrofa
cgcccttccccctccgcacg

SEQ ID NO: 524 - DNA, 20 bp, Sus scrofa
tccggaagccccccgtgcgg

SEQ ID NO: 525 - DNA, 20 bp, Sus scrofa
gcgcccttccccctccgcac

SEQ ID NO: 526 - DNA, 20 bp, Sus scrofa
ccggaagccccccgtgcgga

SEQ ID NO: 527 - DNA, 20 bp, Sus scrofa
ggcgcccttccccctccgca

SEQ ID NO: 528 - DNA, 20 bp, Sus scrofa
cggaagccccccgtgcggag

SEQ ID NO: 529 - DNA, 20 bp, Sus scrofa
ggaagccccccgtgcggagg

SEQ ID NO: 530 - DNA, 20 bp, Sus scrofa
gccccccgtgcggaggggga

SEQ ID NO: 531 - DNA, 20 bp, Sus scrofa
ccccccgtgcggagggggaa

SEQ ID NO: 532 - DNA, 20 bp, Sus scrofa
gagggggaagggcgccgagt

SEQ ID NO: 533 - DNA, 20 bp, Sus scrofa
agggggaagggcgccgagta

SEQ ID NO: 534 - DNA, 20 bp, Sus scrofa
gggggaagggcgccgagtag

SEQ ID NO: 535 - DNA, 20 bp, Sus scrofa
ggggaagggcgccgagtagg

SEQ ID NO: 536 - DNA, 20 bp, Sus scrofa
cgcgaccccgaccccctact

SEQ ID NO: 537 - DNA, 20 bp, Sus scrofa
aagggcgccgagtagggggt

SEQ ID NO: 538 - DNA, 20 bp, Sus scrofa
agggcgccgagtagggggtc

SEQ ID NO: 539 - DNA, 20 bp, Sus scrofa
gggcgccgagtagggggtcg

SEQ ID NO: 540 - DNA, 20 bp, Sus scrofa
cgagtagggggtcggggtcg

SEQ ID NO: 541 - DNA, 20 bp, Sus scrofa
gtagggggtcggggtcgcgg

SEQ ID NO: 542 - DNA, 20 bp, Sus scrofa
tagggggtcggggtcgcggc

SEQ ID NO: 543 - DNA, 20 bp, Sus scrofa
ggggtcggggtcgcggcggg

SEQ ID NO: 544 - DNA, 20 bp, Sus scrofa
gggtcggggtcgcggcggga

SEQ ID NO: 545 - DNA, 20 bp, Sus scrofa
ggggtcgcggcgggagggtg

SEQ ID NO: 546 - DNA, 20 bp, Sus scrofa
gtcgcggcgggagggtgtgg

SEQ ID NO: 547 - DNA, 20 bp, Sus scrofa
ggcgggagggtgtggaggcg

SEQ ID NO: 548 - DNA, 20 bp, Sus scrofa
gtgtggaggcgcggttcgcc

SEQ ID NO: 549 - DNA, 20 bp, Sus scrofa
cagcggggatggggtaggcc

SEQ ID NO: 550 - DNA, 20 bp, Sus scrofa
gcagcggggatggggtaggc

SEQ ID NO: 551 - DNA, 20 bp, Sus scrofa
gccagcagcggggatggggt

SEQ ID NO: 552 - DNA, 20 bp, Sus scrofa
gttggccagcagcggggatg

SEQ ID NO: 553 - DNA, 20 bp, Sus scrofa
agttggccagcagcggggat

SEQ ID NO: 554 - DNA, 20 bp, Sus scrofa
cagttggccagcagcgggga

SEQ ID NO: 555 - DNA, 20 bp, Sus scrofa
gcctaccccatccccgctgc

SEQ ID NO: 556 - DNA, 20 bp, Sus scrofa
ctcccagttggccagcagcg

SEQ ID NO: 557 - DNA, 20 bp, Sus scrofa
gctcccagttggccagcagc

SEQ ID NO: 558 - DNA, 20 bp, Sus scrofa
cgctcccagttggccagcag

SEQ ID NO: 559 - DNA, 20 bp, Sus scrofa
catccccgctgctggccaac

SEQ ID NO: 560 - DNA, 20 bp, Sus scrofa
atccccgctgctggccaact

SEQ ID NO: 561 - DNA, 20 bp, Sus scrofa
ctttcgatctcgctcccagt

SEQ ID NO: 562 - DNA, 20 bp, Sus scrofa
actgggagcgagatcgaaag

SEQ ID NO: 563 - DNA, 20 bp, Sus scrofa
ctgggagcgagatcgaaagc

SEQ ID NO: 564 - DNA, 20 bp, Sus scrofa
agatcgaaagcgggtcgaac

SEQ ID NO: 565 - DNA, 20 bp, Sus scrofa
ctcggcgaagtttaaagagc

SEQ ID NO: 566 - DNA, 20 bp, Sus scrofa
cccctcccccagcacacact

SEQ ID NO: 567 - DNA, 20 bp, Sus scrofa
aaacttcgccgagtgtgtgc

SEQ ID NO: 568 - DNA, 20 bp, Sus scrofa
aacttcgccgagtgtgtgct

SEQ ID NO: 569 - DNA, 20 bp, Sus scrofa
acttcgccgagtgtgtgctg

SEQ ID NO: 570 - DNA, 20 bp, Sus scrofa
cttcgccgagtgtgtgctgg

SEQ ID NO: 571 - DNA, 20 bp, Sus scrofa
cgccgagtgtgtgctggggg

SEQ ID NO: 572 - DNA, 20 bp, Sus scrofa
gccgagtgtgtgctggggga

SEQ ID NO: 573 - DNA, 20 bp, Sus scrofa
ccgagtgtgtgctgggggag

SEQ ID NO: 574 - DNA, 20 bp, Sus scrofa
aaatcgctcccagttcggcg

SEQ ID NO: 575 - DNA, 20 bp, Sus scrofa
gggagcgcgccgcgccgaac

SEQ ID NO: 576 - DNA, 20 bp, Sus scrofa
ggagcgcgccgcgccgaact

SEQ ID NO: 577 - DNA, 20 bp, Sus scrofa
gtgagaaatcgctcccagtt

SEQ ID NO: 578 - DNA, 20 bp, Sus scrofa
cgggaggctcggaggcgagg

SEQ ID NO: 579 - DNA, 20 bp, Sus scrofa
ccgggaggctcggaggcgag

SEQ ID NO: 580 - DNA, 20 bp, Sus scrofa
gccgggaggctcggaggcga

SEQ ID NO: 581 - DNA, 20 bp, Sus scrofa
ggccgggaggctcggaggcg

SEQ ID NO: 582 - DNA, 20 bp, Sus scrofa
gtgtgggccgggaggctcgg

SEQ ID NO: 583 - DNA, 20 bp, Sus scrofa
ggcgtgtgggccgggaggct

SEQ ID NO: 584 - DNA, 20 bp, Sus scrofa
cccctcgcctccgagcctcc

SEQ ID NO: 585 - DNA, 20 bp, Sus scrofa
gggcaggcgtgtgggccggg

SEQ ID NO: 586 - DNA, 20 bp, Sus scrofa
agggggcaggcgtgtgggcc

SEQ ID NO: 587 - DNA, 20 bp, Sus scrofa
cagggggcaggcgtgtgggc

SEQ ID NO: 588 - DNA, 20 bp, Sus scrofa
aaggcagggggcaggcgtgt

SEQ ID NO: 589 - DNA, 20 bp, Sus scrofa
caaggcagggggcaggcgtg

SEQ ID NO: 590 - DNA, 20 bp, Sus scrofa
cccgcctcaaggcagggggc

SEQ ID NO: 591 - DNA, 20 bp, Sus scrofa
ccaccccgcctcaaggcagg

SEQ ID NO: 592 - DNA, 20 bp, Sus scrofa
cccaccccgcctcaaggcag

SEQ ID NO: 593 - DNA, 20 bp, Sus scrofa
ccccaccccgcctcaaggca

SEQ ID NO: 594 - DNA, 20 bp, Sus scrofa
cacgcctgccccctgccttg

SEQ ID NO: 595 - DNA, 20 bp, Sus scrofa
gccccaccccgcctcaaggc

SEQ ID NO: 596 - DNA, 20 bp, Sus scrofa
gcctgccccctgccttgagg

SEQ ID NO: 597 - DNA, 20 bp, Sus scrofa
cctgccccctgccttgaggc

SEQ ID NO: 598 - DNA, 20 bp, Sus scrofa
ccgcgccccaccccgcctca

SEQ ID NO: 599 - DNA, 20 bp, Sus scrofa
ctgccccctgccttgaggcg

SEQ ID NO: 600 - DNA, 20 bp, Sus scrofa
ccccctgccttgaggcgggg

SEQ ID NO: 601 - DNA, 20 bp, Sus scrofa
cccctgccttgaggcggggt

SEQ ID NO: 602 - DNA, 20 bp, Sus scrofa
ccctgccttgaggcggggtg

SEQ ID NO: 603 - DNA, 20 bp, Sus scrofa
ccttgaggcggggtggggcg

SEQ ID NO: 604 - DNA, 20 bp, Sus scrofa
cttgaggcggggtggggcgc

SEQ ID NO: 605 - DNA, 20 bp, Sus scrofa
ggcggggtggggcgcgggtg

SEQ ID NO: 606 - DNA, 20 bp, Sus scrofa
gcggggtggggcgcgggtga

SEQ ID NO: 607 - DNA, 20 bp, Sus scrofa
gggtggggcgcgggtgaggg

SEQ ID NO: 608 - DNA, 20 bp, Sus scrofa
tggggcgcgggtgagggtgg

SEQ ID NO: 609 - DNA, 20 bp, Sus scrofa
ggggcgcgggtgagggtgga

SEQ ID NO: 610 - DNA, 20 bp, Sus scrofa
gggcgcgggtgagggtggag

SEQ ID NO: 611 - DNA, 20 bp, Sus scrofa
ggcgcgggtgagggtggagg

SEQ ID NO: 612 - DNA, 20 bp, Sus scrofa
gggggcactttctgcccgtt

SEQ ID NO: 613 - DNA, 20 bp, Sus scrofa
ggggcactttctgcccgttt

SEQ ID NO: 614 - DNA, 20 bp, Sus scrofa
gggcactttctgcccgtttg

SEQ ID NO: 615 - DNA, 20 bp, Sus scrofa
tctccccctcctccccaaac

SEQ ID NO: 616 - DNA, 20 bp, Sus scrofa
ttctccccctcctccccaaa

SEQ ID NO: 617 - DNA, 20 bp, Sus scrofa
cactttctgcccgtttgggg

SEQ ID NO: 618 - DNA, 20 bp, Sus scrofa
tttctgcccgtttggggagg

SEQ ID NO: 619 - DNA, 20 bp, Sus scrofa
ttctgcccgtttggggagga

SEQ ID NO: 620 - DNA, 20 bp, Sus scrofa
tctgcccgtttggggaggag

SEQ ID NO: 621 - DNA, 20 bp, Sus scrofa
ctgcccgtttggggaggagg

SEQ ID NO: 622 - DNA, 20 bp, Sus scrofa
ggggagaaagctagctaatg

SEQ ID NO: 623 - DNA, 20 bp, Sus scrofa
gggagaaagctagctaatga

SEQ ID NO: 624 - DNA, 20 bp, Sus scrofa
gctagctaatgagggacaaa

SEQ ID NO: 625 - DNA, 20 bp, Sus scrofa
ctagctaatgagggacaaaa

SEQ ID NO: 626 - DNA, 20 bp, Sus scrofa
tagctaatgagggacaaaag

SEQ ID NO: 627 - DNA, 20 bp, Sus scrofa
ctaatgagggacaaaagggg

SEQ ID NO: 628 - DNA, 20 bp, Sus scrofa
taatgagggacaaaaggggt

SEQ ID NO: 629 - DNA, 20 bp, Sus scrofa
aatgagggacaaaaggggtg

SEQ ID NO: 630 - DNA, 20 bp, Sus scrofa
atgagggacaaaaggggtgg

SEQ ID NO: 631 - DNA, 20 bp, Sus scrofa
agggacaaaaggggtggggg

SEQ ID NO: 632 - DNA, 20 bp, Sus scrofa
aggggtgggggaggagaaac

SEQ ID NO: 633 - DNA, 20 bp, Sus scrofa
ttcttaagataaatagctcc

SEQ ID NO: 634 - DNA, 20 bp, Sus scrofa
gggcgcagggggagttctcc

SEQ ID NO: 635 - DNA, 20 bp, Sus scrofa
ggggcgcagggggagttctc

SEQ ID NO: 636 - DNA, 20 bp, Sus scrofa
acggcggggaggggcgcagg

SEQ ID NO: 637 - DNA, 20 bp, Sus scrofa
cacggcggggaggggcgcag

SEQ ID NO: 638 - DNA, 20 bp, Sus scrofa
gcacggcggggaggggcgca

SEQ ID NO: 639 - DNA, 20 bp, Sus scrofa
agcacggcggggaggggcgc

SEQ ID NO: 640 - DNA, 20 bp, Sus scrofa
ggggagagcacggcggggag

SEQ ID NO: 641 - DNA, 20 bp, Sus scrofa
gggggagagcacggcgggga

SEQ ID NO: 642 - DNA, 20 bp, Sus scrofa
cgggggagagcacggcgggg

SEQ ID NO: 643 - DNA, 20 bp, Sus scrofa
acccgggggagagcacggcg

SEQ ID NO: 644 - DNA, 20 bp, Sus scrofa
gacccgggggagagcacggc

SEQ ID NO: 645 - DNA, 20 bp, Sus scrofa
ggacccgggggagagcacgg

SEQ ID NO: 646 - DNA, 20 bp, Sus scrofa
aggggacccgggggagagca

SEQ ID NO: 647 - DNA, 20 bp, Sus scrofa
ctccccgccgtgctctcccc

SEQ ID NO: 648 - DNA, 20 bp, Sus scrofa
tccccgccgtgctctccccc

SEQ ID NO: 649 - DNA, 20 bp, Sus scrofa
gtgggtgtgaggggacccgg

SEQ ID NO: 650 - DNA, 20 bp, Sus scrofa
ggtgggtgtgaggggacccg

SEQ ID NO: 651 - DNA, 20 bp, Sus scrofa
aggtgggtgtgaggggaccc

SEQ ID NO: 652 - DNA, 20 bp, Sus scrofa
aaggtgggtgtgaggggacc

SEQ ID NO: 653 - DNA, 20 bp, Sus scrofa
gctccgaaggtgggtgtgag

SEQ ID NO: 654 - DNA, 20 bp, Sus scrofa
ggctccgaaggtgggtgtga

SEQ ID NO: 655 - DNA, 20 bp, Sus scrofa
aggctccgaaggtgggtgtg

SEQ ID NO: 656 - DNA, 20 bp, Sus scrofa
ggtcccctcacacccacctt

SEQ ID NO: 657 - DNA, 20 bp, Sus scrofa
ttgggagaggctccgaaggt

SEQ ID NO: 658 - DNA, 20 bp, Sus scrofa
gttgggagaggctccgaagg

SEQ ID NO: 659 - DNA, 20 bp, Sus scrofa
agagttgggagaggctccga

SEQ ID NO: 660 - DNA, 20 bp, Sus scrofa
cctcggatcagagttgggag

SEQ ID NO: 661 - DNA, 20 bp, Sus scrofa
ccggccctcggatcagagtt

SEQ ID NO: 662 - DNA, 20 bp, Sus scrofa
accggccctcggatcagagt

SEQ ID NO: 663 - DNA, 20 bp, Sus scrofa
cctctcccaactctgatccg

SEQ ID NO: 664 - DNA, 20 bp, Sus scrofa
ctctcccaactctgatccga

SEQ ID NO: 665 - DNA, 20 bp, Sus scrofa
cccaactctgatccgagggc

SEQ ID NO: 666 - DNA, 20 bp, Sus scrofa
gcggcgtggccaccggccct

SEQ ID NO: 667 - DNA, 20 bp, Sus scrofa
aactctgatccgagggccgg

SEQ ID NO: 668 - DNA, 20 bp, Sus scrofa
cggcgtcgcggcgtggccac

SEQ ID NO: 669 - DNA, 20 bp, Sus scrofa
cctatttcggcgtcgcggcg

SEQ ID NO: 670 - DNA, 20 bp, Sus scrofa
ctcgtcctatttcggcgtcg

SEQ ID NO: 671 - DNA, 20 bp, Sus scrofa
ccacgccgcgacgccgaaat

SEQ ID NO: 672 - DNA, 20 bp, Sus scrofa
catggctgctcgtcctattt

SEQ ID NO: 673 - DNA, 20 bp, Sus scrofa
cgcgcgagacccgggaaaca

SEQ ID NO: 674 - DNA, 20 bp, Sus scrofa
ggacgagcagccatgtttcc

SEQ ID NO: 675 - DNA, 20 bp, Sus scrofa
gacgagcagccatgtttccc

SEQ ID NO: 676 - DNA, 20 bp, Sus scrofa
gggcgggccgcgcgagaccc

SEQ ID NO: 677 - DNA, 20 bp, Sus scrofa
ggggcgggccgcgcgagacc

SEQ ID NO: 678 - DNA, 20 bp, Sus scrofa
catgtttcccgggtctcgcg

SEQ ID NO: 679 - DNA, 20 bp, Sus scrofa
ccatgggggaggggcggggc

SEQ ID NO: 680 - DNA, 20 bp, Sus scrofa
gccatgggggaggggcgggg

SEQ ID NO: 681 - DNA, 20 bp, Sus scrofa
cgcgccatgggggaggggcg

SEQ ID NO: 682 - DNA, 20 bp, Sus scrofa
ccgcgccatgggggaggggc

SEQ ID NO: 683 - DNA, 20 bp, Sus scrofa
gccgcgccatgggggagggg

SEQ ID NO: 684 - DNA, 20 bp, Sus scrofa
ccggccgcgccatgggggag

SEQ ID NO: 685 - DNA, 20 bp, Sus scrofa
gccggccgcgccatggggga

SEQ ID NO: 686 - DNA, 20 bp, Sus scrofa
cccgccccgcccctccccca

SEQ ID NO: 687 - DNA, 20 bp, Sus scrofa
cgccggccgcgccatggggg

SEQ ID NO: 688 - DNA, 20 bp, Sus scrofa
cggcgccggccgcgccatgg

SEQ ID NO: 689 - DNA, 20 bp, Sus scrofa
tcggcgccggccgcgccatg

SEQ ID NO: 690 - DNA, 20 bp, Sus scrofa
cccgcccctcccccatggcg

SEQ ID NO: 691 - DNA, 20 bp, Sus scrofa
ctcggcgccggccgcgccat

SEQ ID NO: 692 - DNA, 20 bp, Sus scrofa
gctcggcgccggccgcgcca

SEQ ID NO: 693 - DNA, 20 bp, Sus scrofa
cccctcccccatggcgcggc

SEQ ID NO: 694 - DNA, 20 bp, Sus scrofa
cggagccccgcgctcggcgc

SEQ ID NO: 695 - DNA, 20 bp, Sus scrofa
ggcgcggccggcgccgagcg

SEQ ID NO: 696 - DNA, 20 bp, Sus scrofa
gcgcggccggcgccgagcgc

SEQ ID NO: 697 - DNA, 20 bp, Sus scrofa
cgcggccggcgccgagcgcg

SEQ ID NO: 698 - DNA, 20 bp, Sus scrofa
cgcattcggagccccgcgct

SEQ ID NO: 699 - DNA, 20 bp, Sus scrofa
cgagcgcggggctccgaatg

SEQ ID NO: 700 - DNA, 20 bp, Sus scrofa
gagcgcggggctccgaatgc

SEQ ID NO: 701 - DNA, 20 bp, Sus scrofa
tggagcctggcgcccgcatt

SEQ ID NO: 702 - DNA, 20 bp, Sus scrofa
gggctccgaatgcgggcgcc

SEQ ID NO: 703 - DNA, 20 bp, Sus scrofa
accccgcgccacatggagcc

SEQ ID NO: 704 - DNA, 20 bp, Sus scrofa
tgcgggcgccaggctccatg

SEQ ID NO: 705 - DNA, 20 bp, Sus scrofa
agcccgcaccccgcgccaca

SEQ ID NO: 706 - DNA, 20 bp, Sus scrofa
gcgccaggctccatgtggcg

SEQ ID NO: 707 - DNA, 20 bp, Sus scrofa
cgccaggctccatgtggcgc

SEQ ID NO: 708 - DNA, 20 bp, Sus scrofa
gccaggctccatgtggcgcg

SEQ ID NO: 709 - DNA, 20 bp, Sus scrofa
gctccatgtggcgcggggtg

SEQ ID NO: 710 - DNA, 20 bp, Sus scrofa
ctccatgtggcgcggggtgc

SEQ ID NO: 711 - DNA, 20 bp, Sus scrofa
atgtggcgcggggtgcgggc

SEQ ID NO: 712 - DNA, 20 bp, Sus scrofa
ggcgcggggtgcgggctggt

SEQ ID NO: 713 - DNA, 20 bp, Sus scrofa
cggggtgcgggctggttggc

SEQ ID NO: 714 - DNA, 20 bp, Sus scrofa
cgggctggttggcaggcgac

SEQ ID NO: 715 - DNA, 20 bp, Sus scrofa
gggctggttggcaggcgacc

SEQ ID NO: 716 - DNA, 20 bp, Sus scrofa
ctggttggcaggcgaccggg

SEQ ID NO: 717 - DNA, 20 bp, Sus scrofa
gcgcacagggccaggccacc

SEQ ID NO: 718 - DNA, 20 bp, Sus scrofa
tggcaggcgaccgggtggcc

SEQ ID NO: 719 - DNA, 20 bp, Sus scrofa
cgacctgcgcgcacagggcc

SEQ ID NO: 720 - DNA, 20 bp, Sus scrofa
cgacccgacctgcgcgcaca

SEQ ID NO: 721 - DNA, 20 bp, Sus scrofa
gcgacccgacctgcgcgcac

SEQ ID NO: 722 - DNA, 20 bp, Sus scrofa
tggcctggccctgtgcgcgc

SEQ ID NO: 723 - DNA, 20 bp, Sus scrofa
ctggccctgtgcgcgcaggt

SEQ ID NO: 724 - DNA, 20 bp, Sus scrofa
tggccctgtgcgcgcaggtc

SEQ ID NO: 725 - DNA, 20 bp, Sus scrofa
tgtgcgcgcaggtcgggtcg

SEQ ID NO: 726 - DNA, 20 bp, Sus scrofa
aggtcgggtcgcggccgcgc

SEQ ID NO: 727 - DNA, 20 bp, Sus scrofa
ggtcgggtcgcggccgcgcc

SEQ ID NO: 728 - DNA, 20 bp, Sus scrofa
gcccgggggccagcccggcg

SEQ ID NO: 729 - DNA, 20 bp, Sus scrofa
gggtcgcggccgcgccgggc

SEQ ID NO: 730 - DNA, 20 bp, Sus scrofa
ggcccgcccgggggccagcc

SEQ ID NO: 731 - DNA, 20 bp, Sus scrofa
ggccgcgccgggctggcccc

SEQ ID NO: 732 - DNA, 20 bp, Sus scrofa
gccgcgccgggctggccccc

SEQ ID NO: 733 - DNA, 20 bp, Sus scrofa
gcgccgggctggcccccggg

SEQ ID NO: 734 - DNA, 20 bp, Sus scrofa
cgccgggctggcccccgggc

SEQ ID NO: 735 - DNA, 20 bp, Sus scrofa
aagccaaaaggcccgcccgg

SEQ ID NO: 736 - DNA, 20 bp, Sus scrofa
aaagccaaaaggcccgcccg

SEQ ID NO: 737 - DNA, 20 bp, Sus scrofa
gaaagccaaaaggcccgccc

SEQ ID NO: 738 - DNA, 20 bp, Sus scrofa
ggaaagccaaaaggcccgcc

SEQ ID NO: 739 - DNA, 20 bp, Sus scrofa
tggcccccgggcgggccttt

SEQ ID NO: 740 - DNA, 20 bp, Sus scrofa
aaccagctcggaaagccaaa

SEQ ID NO: 741 - DNA, 20 bp, Sus scrofa
ggccttttggctttccgagc

SEQ ID NO: 742 - DNA, 20 bp, Sus scrofa
ccttgagctcaaaaccagct

SEQ ID NO: 743 - DNA, 20 bp, Sus scrofa
ccgagctggttttgagctca

SEQ ID NO: 744 - DNA, 20 bp, Sus scrofa
tattattgttgtttttttaa

SEQ ID NO: 745 - DNA, 20 bp, Sus scrofa
gattcggcctcgggcggctt

SEQ ID NO: 746 - DNA, 20 bp, Sus scrofa
ttaacggccgaagccgcccg

SEQ ID NO: 747 - DNA, 20 bp, Sus scrofa
ccttcggattcggcctcggg

SEQ ID NO: 748 - DNA, 20 bp, Sus scrofa
gccccttcggattcggcctc

SEQ ID NO: 749 - DNA, 20 bp, Sus scrofa
cgccccttcggattcggcct

SEQ ID NO: 750 - DNA, 20 bp, Sus scrofa
cctcggcgccccttcggatt

SEQ ID NO: 751 - DNA, 20 bp, Sus scrofa
ccgcccgaggccgaatccga

SEQ ID NO: 752 - DNA, 20 bp, Sus scrofa
cgcccgaggccgaatccgaa

SEQ ID NO: 753 - DNA, 20 bp, Sus scrofa
gcccgaggccgaatccgaag

SEQ ID NO: 754 - DNA, 20 bp, Sus scrofa
ataacgcctcggcgcccctt

SEQ ID NO: 755 - DNA, 20 bp, Sus scrofa
ccgaatccgaaggggcgccg

SEQ ID NO: 756 - DNA, 20 bp, Sus scrofa
ctgccccccccataacgcct

SEQ ID NO: 757 - DNA, 20 bp, Sus scrofa
gaaggggcgccgaggcgtta

SEQ ID NO: 758 - DNA, 20 bp, Sus scrofa
aaggggcgccgaggcgttat

SEQ ID NO: 759 - DNA, 20 bp, Sus scrofa
aggggcgccgaggcgttatg

SEQ ID NO: 760 - DNA, 20 bp, Sus scrofa
ggggcgccgaggcgttatgg

SEQ ID NO: 761 - DNA, 20 bp, Sus scrofa
gggcgccgaggcgttatggg

SEQ ID NO: 762 - DNA, 20 bp, Sus scrofa
ggcgccgaggcgttatgggg

SEQ ID NO: 763 - DNA, 20 bp, Sus scrofa
gcgccgaggcgttatggggg

SEQ ID NO: 764 - DNA, 20 bp, Sus scrofa
cgaggcgttatggggggggc

SEQ ID NO: 765 - DNA, 20 bp, Sus scrofa
gaggcgttatggggggggca

SEQ ID NO: 766 - DNA, 20 bp, Sus scrofa
cgttatggggggggcaggga

SEQ ID NO: 767 - DNA, 20 bp, Sus scrofa
ggggggcagggacggccgcc

SEQ ID NO: 768 - DNA, 20 bp, Sus scrofa
gggggcagggacggccgcca

SEQ ID NO: 769 - DNA, 20 bp, Sus scrofa
acaggcgaccaggaccctgg

SEQ ID NO: 770 - DNA, 20 bp, Sus scrofa
agggacggccgccagggtcc

SEQ ID NO: 771 - DNA, 20 bp, Sus scrofa
gccacaggcgaccaggaccc

SEQ ID NO: 772 - DNA, 20 bp, Sus scrofa
cagtcgtgccacaggcgacc

SEQ ID NO: 773 - DNA, 20 bp, Sus scrofa
gccagggtcctggtcgcctg

SEQ ID NO: 774 - DNA, 20 bp, Sus scrofa
gcgcccagcagtcgtgccac

SEQ ID NO: 775 - DNA, 20 bp, Sus scrofa
gtcgcctgtggcacgactgc

SEQ ID NO: 776 - DNA, 20 bp, Sus scrofa
tcgcctgtggcacgactgct

SEQ ID NO: 777 - DNA, 20 bp, Sus scrofa
gtggcacgactgctgggcgc

SEQ ID NO: 778 - DNA, 20 bp, Sus scrofa
tggcacgactgctgggcgcc

SEQ ID NO: 779 - DNA, 20 bp, Sus scrofa
acggtgacaaaatggcagcc

SEQ ID NO: 780 - DNA, 20 bp, Sus scrofa
caacagccacggtgacaaaa

SEQ ID NO: 781 - DNA, 20 bp, Sus scrofa
gggctgccattttgtcaccg

SEQ ID NO: 782 - DNA, 20 bp, Sus scrofa
cccaacagcgacaacagcca

SEQ ID NO: 783 - DNA, 20 bp, Sus scrofa
accgtggctgttgtcgctgt

SEQ ID NO: 784 - DNA, 20 bp, Sus scrofa
ccgtggctgttgtcgctgtt

SEQ ID NO: 785 - DNA, 20 bp, Sus scrofa
cgtggctgttgtcgctgttg

SEQ ID NO: 786 - DNA, 20 bp, Sus scrofa
gtggctgttgtcgctgttgg

SEQ ID NO: 787 - DNA, 20 bp, Sus scrofa
tggctgttgtcgctgttggg

SEQ ID NO: 788 - DNA, 20 bp, Sus scrofa
ggctgttgtcgctgttgggg

SEQ ID NO: 789 - DNA, 20 bp, Sus scrofa
gctgttgtcgctgttggggg

SEQ ID NO: 790 - DNA, 20 bp, Sus scrofa
ctgttgtcgctgttgggggg

SEQ ID NO: 791 - DNA, 20 bp, Sus scrofa
gtccggggccgtcggggcga

SEQ ID NO: 792 - DNA, 20 bp, Sus scrofa
ctcttgcgccatcgccccga

SEQ ID NO: 793 - DNA, 20 bp, Sus scrofa
ctccaggtccggggccgtcg

SEQ ID NO: 794 - DNA, 20 bp, Sus scrofa
tctccaggtccggggccgtc

SEQ ID NO: 795 - DNA, 20 bp, Sus scrofa
gtctccaggtccggggccgt

SEQ ID NO: 796 - DNA, 20 bp, Sus scrofa
cgccatcgccccgacggccc

SEQ ID NO: 797 - DNA, 20 bp, Sus scrofa
cgccccgacggccccggacc

SEQ ID NO: 798 - DNA, 20 bp, Sus scrofa
ccctgctgtctccaggtccg

SEQ ID NO: 799 - DNA, 20 bp, Sus scrofa
cccctgctgtctccaggtcc

SEQ ID NO: 800 - DNA, 20 bp, Sus scrofa
ccccctgctgtctccaggtc

SEQ ID NO: 801 - DNA, 20 bp, Sus scrofa
cggctccccctgctgtctcc

SEQ ID NO: 802 - DNA, 20 bp, Sus scrofa
gccccggacctggagacagc

SEQ ID NO: 803 - DNA, 20 bp, Sus scrofa
ccccggacctggagacagca

SEQ ID NO: 804 - DNA, 20 bp, Sus scrofa
cccggacctggagacagcag

SEQ ID NO: 805 - DNA, 20 bp, Sus scrofa
ccggacctggagacagcagg

SEQ ID NO: 806 - DNA, 20 bp, Sus scrofa
ctggagacagcagggggagc

SEQ ID NO: 807 - DNA, 20 bp, Sus scrofa
cagcagggggagccggtccc

SEQ ID NO: 808 - DNA, 20 bp, Sus scrofa
agcagggggagccggtccca

SEQ ID NO: 809 - DNA, 20 bp, Sus scrofa
gggggggtggtccctgggac

SEQ ID NO: 810 - DNA, 20 bp, Sus scrofa
aactggggggggtggtccct

SEQ ID NO: 811 - DNA, 20 bp, Sus scrofa
caactggggggggtggtccc

SEQ ID NO: 812 - DNA, 20 bp, Sus scrofa
cagagtacaactgggggggg

SEQ ID NO: 813 - DNA, 20 bp, Sus scrofa
gcccagagtacaactggggg

SEQ ID NO: 814 - DNA, 20 bp, Sus scrofa
ggcccagagtacaactgggg

SEQ ID NO: 815 - DNA, 20 bp, Sus scrofa
gggcccagagtacaactggg

SEQ ID NO: 816 - DNA, 20 bp, Sus scrofa
ggggcccagagtacaactgg

SEQ ID NO: 817 - DNA, 20 bp, Sus scrofa
gggggcccagagtacaactg

SEQ ID NO: 818 - DNA, 20 bp, Sus scrofa
tgggggcccagagtacaact

SEQ ID NO: 819 - DNA, 20 bp, Sus scrofa
atgggggcccagagtacaac

SEQ ID NO: 820 - DNA, 20 bp, Sus scrofa
caccccccccagttgtactc

SEQ ID NO: 821 - DNA, 20 bp, Sus scrofa
accccccccagttgtactct

SEQ ID NO: 822 - DNA, 20 bp, Sus scrofa
tgtactctgggcccccatgc

SEQ ID NO: 823 - DNA, 20 bp, Sus scrofa
cagggaggggaccggcatgg

SEQ ID NO: 824 - DNA, 20 bp, Sus scrofa
acagggaggggaccggcatg

SEQ ID NO: 825 - DNA, 20 bp, Sus scrofa
cacagggaggggaccggcat

SEQ ID NO: 826 - DNA, 20 bp, Sus scrofa
gcacagggaggggaccggca

SEQ ID NO: 827 - DNA, 20 bp, Sus scrofa
agttggcacagggaggggac

SEQ ID NO: 828 - DNA, 20 bp, Sus scrofa
caggcagttggcacagggag

SEQ ID NO: 829 - DNA, 20 bp, Sus scrofa
tcaggcagttggcacaggga

SEQ ID NO: 830 - DNA, 20 bp, Sus scrofa
ctcaggcagttggcacaggg

SEQ ID NO: 831 - DNA, 20 bp, Sus scrofa
agcctcaggcagttggcaca

SEQ ID NO: 832 - DNA, 20 bp, Sus scrofa
gagcctcaggcagttggcac

SEQ ID NO: 833 - DNA, 20 bp, Sus scrofa
ccagcagagcctcaggcagt

SEQ ID NO: 834 - DNA, 20 bp, Sus scrofa
ctccctgtgccaactgcctg

SEQ ID NO: 835 - DNA, 20 bp, Sus scrofa
cggcgctccagcagagcctc

SEQ ID NO: 836 - DNA, 20 bp, Sus scrofa
ccaactgcctgaggctctgc

SEQ ID NO: 837 - DNA, 20 bp, Sus scrofa
gaggctctgctggagcgccg

SEQ ID NO: 838 - DNA, 20 bp, Sus scrofa
gctctgctggagcgccgcgg

SEQ ID NO: 839 - DNA, 20 bp, Sus scrofa
ctacggagccacggccgccg

SEQ ID NO: 840 - DNA, 20 bp, Sus scrofa
ctggagcgccgcggcggccg

SEQ ID NO: 841 - DNA, 20 bp, Sus scrofa
atcgtcaccctacggagcca

SEQ ID NO: 842 - DNA, 20 bp, Sus scrofa
cgcggcggccgtggctccgt

SEQ ID NO: 843 - DNA, 20 bp, Sus scrofa
gcggcggccgtggctccgta

SEQ ID NO: 844 - DNA, 20 bp, Sus scrofa
cagggaggatcgtcacccta

SEQ ID NO: 845 - DNA, 20 bp, Sus scrofa
tggggggagcactcgcaggg

SEQ ID NO: 846 - DNA, 20 bp, Sus scrofa
gggtggggggagcactcgca

SEQ ID NO: 847 - DNA, 20 bp, Sus scrofa
ggggtggggggagcactcgc

SEQ ID NO: 848 - DNA, 20 bp, Sus scrofa
agaacgcgccggggggtggg

SEQ ID NO: 849 - DNA, 20 bp, Sus scrofa
gagaacgcgccggggggtgg

SEQ ID NO: 850 - DNA, 20 bp, Sus scrofa
agagaacgcgccggggggtg

SEQ ID NO: 851 - DNA, 20 bp, Sus scrofa
cgagtgctccccccaccccc

SEQ ID NO: 852 - DNA, 20 bp, Sus scrofa
cagagaacgcgccggggggt

SEQ ID NO: 853 - DNA, 20 bp, Sus scrofa
gcagagaacgcgccgggggg

SEQ ID NO: 854 - DNA, 20 bp, Sus scrofa
gaggcagagaacgcgccggg

SEQ ID NO: 855 - DNA, 20 bp, Sus scrofa
ggaggcagagaacgcgccgg

SEQ ID NO: 856 - DNA, 20 bp, Sus scrofa
gggaggcagagaacgcgccg

SEQ ID NO: 857 - DNA, 20 bp, Sus scrofa
ggggaggcagagaacgcgcc

SEQ ID NO: 858 - DNA, 20 bp, Sus scrofa
gggggaggcagagaacgcgc

SEQ ID NO: 859 - DNA, 20 bp, Sus scrofa
ggcgagaagaggggcggggg

SEQ ID NO: 860 - DNA, 20 bp, Sus scrofa
actggcgagaagaggggcgg

SEQ ID NO: 861 - DNA, 20 bp, Sus scrofa
tactggcgagaagaggggcg

SEQ ID NO: 862 - DNA, 20 bp, Sus scrofa
atactggcgagaagaggggc

SEQ ID NO: 863 - DNA, 20 bp, Sus scrofa
gatactggcgagaagagggg

SEQ ID NO: 864 - DNA, 20 bp, Sus scrofa
cgagatactggcgagaagag

SEQ ID NO: 865 - DNA, 20 bp, Sus scrofa
gcgagatactggcgagaaga

SEQ ID NO: 866 - DNA, 20 bp, Sus scrofa
ggcgagatactggcgagaag

SEQ ID NO: 867 - DNA, 20 bp, Sus scrofa
caggaggaagggcgagatac

SEQ ID NO: 868 - DNA, 20 bp, Sus scrofa
taaaacgcctgcaggaggaa

SEQ ID NO: 869 - DNA, 20 bp, Sus scrofa
ctaaaacgcctgcaggagga

SEQ ID NO: 870 - DNA, 20 bp, Sus scrofa
tatctcgcccttcctcctgc

SEQ ID NO: 871 - DNA, 20 bp, Sus scrofa
acggctaaaacgcctgcagg

SEQ ID NO: 872 - DNA, 20 bp, Sus scrofa
actacggctaaaacgcctgc

SEQ ID NO: 873 - DNA, 20 bp, Sus scrofa
tttagggccacatttaacta

SEQ ID NO: 874 - DNA, 20 bp, Sus scrofa
gttttagccgtagttaaatg

SEQ ID NO: 875 - DNA, 20 bp, Sus scrofa
gggcgatccgttcgtcttta

SEQ ID NO: 876 - DNA, 20 bp, Sus scrofa
agggcgatccgttcgtcttt

SEQ ID NO: 877 - DNA, 20 bp, Sus scrofa
aatgtggccctaaagacgaa

SEQ ID NO: 878 - DNA, 20 bp, Sus scrofa
taaagacgaacggatcgccc

SEQ ID NO: 879 - DNA, 20 bp, Sus scrofa
ccgccaaagagcaaacacca

SEQ ID NO: 880 - DNA, 20 bp, Sus scrofa
tccgccaaagagcaaacacc

SEQ ID NO: 881 - DNA, 20 bp, Sus scrofa
tcgccctggtgtttgctctt

SEQ ID NO: 882 - DNA, 20 bp, Sus scrofa
ccctggtgtttgctctttgg

SEQ ID NO: 883 - DNA, 20 bp, Sus scrofa
tgctctttggcggaagtgat

SEQ ID NO: 884 - DNA, 20 bp, Sus scrofa
tctttggcggaagtgatagg

SEQ ID NO: 885 - DNA, 20 bp, Sus scrofa
ctttggcggaagtgatagga

SEQ ID NO: 886 - DNA, 20 bp, Sus scrofa
tggcggaagtgataggaggg

SEQ ID NO: 887 - DNA, 20 bp, Sus scrofa
ggcggaagtgataggagggt

SEQ ID NO: 888 - DNA, 20 bp, Sus scrofa
gcggaagtgataggagggtg

SEQ ID NO: 889 - DNA, 20 bp, Sus scrofa
cggaagtgataggagggtgg

SEQ ID NO: 890 - DNA, 20 bp, Sus scrofa
ggaagtgataggagggtggg

SEQ ID NO: 891 - DNA, 20 bp, Sus scrofa
ggggggagaaattaaacaag

SEQ ID NO: 892 - DNA, 20 bp, Sus scrofa
attaaacaagaggtttcttt

SEQ ID NO: 893 - DNA, 20 bp, Sus scrofa
ttaaacaagaggtttctttt

SEQ ID NO: 894 - DNA, 20 bp, Sus scrofa
taaacaagaggtttcttttg

SEQ ID NO: 895 - DNA, 20 bp, Sus scrofa
aaacaagaggtttcttttgg

SEQ ID NO: 896 - DNA, 20 bp, Sus scrofa
caagaggtttcttttggggg

SEQ ID NO: 897 - DNA, 20 bp, Sus scrofa
gaggtttcttttgggggagg

SEQ ID NO: 898 - DNA, 20 bp, Sus scrofa
aggtttcttttgggggaggc

SEQ ID NO: 899 - DNA, 20 bp, Sus scrofa
gggtgcgcacgcgactctag

SEQ ID NO: 900 - DNA, 20 bp, Sus scrofa
tgccttcttggcttcagtca

SEQ ID NO: 901 - DNA, 20 bp, Sus scrofa
ctgccttcttggcttcagtc

SEQ ID NO: 902 - DNA, 20 bp, Sus scrofa
ggccctgactgaagccaaga

SEQ ID NO: 903 - DNA, 20 bp, Sus scrofa
cgggtaaacggctgccttct

SEQ ID NO: 904 - DNA, 20 bp, Sus scrofa
caagaaggcagccgtttacc

SEQ ID NO: 905 - DNA, 20 bp, Sus scrofa
actcgtccctcccgggtaaa

SEQ ID NO: 906 - DNA, 20 bp, Sus scrofa
aagaaggcagccgtttaccc

SEQ ID NO: 907 - DNA, 20 bp, Sus scrofa
aaggcagccgtttacccggg

SEQ ID NO: 908 - DNA, 20 bp, Sus scrofa
aggcagccgtttacccggga

SEQ ID NO: 909 - DNA, 20 bp, Sus scrofa
cgcatcaactcgtccctccc

SEQ ID NO: 910 - DNA, 20 bp, Sus scrofa
acgcatcaactcgtccctcc

SEQ ID NO: 911 - DNA, 20 bp, Sus scrofa
ggagggacgagttgatgcgt

SEQ ID NO: 912 - DNA, 20 bp, Sus scrofa
gagggacgagttgatgcgtt

SEQ ID NO: 913 - DNA, 20 bp, Sus scrofa
agggacgagttgatgcgttg

SEQ ID NO: 914 - DNA, 20 bp, Sus scrofa
tgcgttggggaaacgccctc

SEQ ID NO: 915 - DNA, 20 bp, Sus scrofa
gcgttggggaaacgccctca

SEQ ID NO: 916 - DNA, 20 bp, Sus scrofa
cgttggggaaacgccctcag

SEQ ID NO: 917 - DNA, 20 bp, Sus scrofa
ccggagagcccagcccctga

SEQ ID NO: 918 - DNA, 20 bp, Sus scrofa
cccggagagcccagcccctg

SEQ ID NO: 919 - DNA, 20 bp, Sus scrofa
ggggaaacgccctcaggggc

SEQ ID NO: 920 - DNA, 20 bp, Sus scrofa
gggaaacgccctcaggggct

SEQ ID NO: 921 - DNA, 20 bp, Sus scrofa
ccctcaggggctgggctctc

SEQ ID NO: 922 - DNA, 20 bp, Sus scrofa
cctcaggggctgggctctcc

SEQ ID NO: 923 - DNA, 20 bp, Sus scrofa
aggggctgggctctccggga

SEQ ID NO: 924 - DNA, 20 bp, Sus scrofa
cggagcgcgacctaccttcc

SEQ ID NO: 925 - DNA, 20 bp, Sus scrofa
gctgggctctccgggaaggt

SEQ ID NO: 926 - DNA, 20 bp, Sus scrofa
taggtcgcgctccgcgtttc

SEQ ID NO: 927 - DNA, 20 bp, Sus scrofa
tgcaacacccacctgaaacg

SEQ ID NO: 928 - DNA, 20 bp, Sus scrofa
gtcgcgctccgcgtttcagg

SEQ ID NO: 929 - DNA, 20 bp, Sus scrofa
tcgcgctccgcgtttcaggt

SEQ ID NO: 930 - DNA, 20 bp, Sus scrofa
tgggtgttgcagcgccctgc

SEQ ID NO: 931 - DNA, 20 bp, Sus scrofa
gcctcccctagcagccagca

SEQ ID NO: 932 - DNA, 20 bp, Sus scrofa
ggcctcccctagcagccagc

SEQ ID NO: 933 - DNA, 20 bp, Sus scrofa
gcagcgccctgctggctgct

SEQ ID NO: 934 - DNA, 20 bp, Sus scrofa
cagcgccctgctggctgcta

SEQ ID NO: 935 - DNA, 20 bp, Sus scrofa
agcgccctgctggctgctag

SEQ ID NO: 936 - DNA, 20 bp, Sus scrofa
gccctgctggctgctagggg

SEQ ID NO: 937 - DNA, 20 bp, Sus scrofa
ggagcagaaaaagagcaagg

SEQ ID NO: 938 - DNA, 20 bp, Sus scrofa
aggagcagaaaaagagcaag

SEQ ID NO: 939 - DNA, 20 bp, Sus scrofa
gaggagcagaaaaagagcaa

SEQ ID NO: 940 - DNA, 20 bp, Sus scrofa
ggaggagcagaaaaagagca

SEQ ID NO: 941 - DNA, 20 bp, Sus scrofa
tgggcacaaataaaaggggg

SEQ ID NO: 942 - DNA, 20 bp, Sus scrofa
ccttgggcacaaataaaagg

SEQ ID NO: 943 - DNA, 20 bp, Sus scrofa
cccttgggcacaaataaaag

SEQ ID NO: 944 - DNA, 20 bp, Sus scrofa
tcccttgggcacaaataaaa

SEQ ID NO: 945 - DNA, 20 bp, Sus scrofa
ttcccttgggcacaaataaa

SEQ ID NO: 946 - DNA, 20 bp, Sus scrofa
cccccttttatttgtgccca

SEQ ID NO: 947 - DNA, 20 bp, Sus scrofa
ccccttttatttgtgcccaa

SEQ ID NO: 948 - DNA, 20 bp, Sus scrofa
ttttatttgtgcccaaggga

SEQ ID NO: 949 - DNA, 20 bp, Sus scrofa
tactgtagctgccttccctt

SEQ ID NO: 950 - DNA, 20 bp, Sus scrofa
ctactgtagctgccttccct

SEQ ID NO: 951 - DNA, 20 bp, Sus scrofa
gtagtaaaagtaaccctaaa

SEQ ID NO: 952 - DNA, 20 bp, Sus scrofa
tccctattcttttccgttta

SEQ ID NO: 953 - DNA, 20 bp, Sus scrofa
ctccctattcttttccgttt

SEQ ID NO: 954 - DNA, 20 bp, Sus scrofa
aaccctaaacggaaaagaat

SEQ ID NO: 955 - DNA, 20 bp, Sus scrofa
accctaaacggaaaagaata

SEQ ID NO: 956 - DNA, 20 bp, Sus scrofa
acggaaaagaatagggagta

SEQ ID NO: 957 - DNA, 20 bp, Sus scrofa
aaagacatttactttttaaa

SEQ ID NO: 958 - DNA, 20 bp, Sus scrofa
aagagccagagaaaggtggt

SEQ ID NO: 959 - DNA, 20 bp, Sus scrofa
agtcaagagccagagaaagg

SEQ ID NO: 960 - DNA, 20 bp, Sus scrofa
tttttccaaccacctttctc

SEQ ID NO: 961 - DNA, 20 bp, Sus scrofa
tggagtcaagagccagagaa

SEQ ID NO: 962 - DNA, 20 bp, Sus scrofa
tggctcttgactccagagcc

SEQ ID NO: 963 - DNA, 20 bp, Sus scrofa
cgcgatgcccttcctggctc

SEQ ID NO: 964 - DNA, 20 bp, Sus scrofa
tcttgactccagagccagga

SEQ ID NO: 965 - DNA, 20 bp, Sus scrofa
cttgactccagagccaggaa

SEQ ID NO: 966 - DNA, 20 bp, Sus scrofa
cagcgacgcgatgcccttcc

SEQ ID NO: 967 - DNA, 20 bp, Sus scrofa
tcgcgtcgctgaagtctctc

SEQ ID NO: 968 - DNA, 20 bp, Sus scrofa
cgcgtcgctgaagtctctct

SEQ ID NO: 969 - DNA, 20 bp, Sus scrofa
ggactttttaaaagttgata

SEQ ID NO: 970 - DNA, 20 bp, Sus scrofa
ttaaaagttgatatggatgc

SEQ ID NO: 971 - DNA, 20 bp, Sus scrofa
atgctggttaagcacctcat

SEQ ID NO: 972 - DNA, 20 bp, Sus scrofa
ctagtagagtttaaccaatg

SEQ ID NO: 973 - DNA, 20 bp, Sus scrofa
aactctactagacgtctgca

SEQ ID NO: 974 - DNA, 20 bp, Sus scrofa
cgtctgcatggagactttca

SEQ ID NO: 975 - DNA, 20 bp, Sus scrofa
ttcaaggcagtgcccgacta

SEQ ID NO: 976 - DNA, 20 bp, Sus scrofa
ctttctgggcagccttagtc

SEQ ID NO: 977 - DNA, 20 bp, Sus scrofa
actttctgggcagccttagt

SEQ ID NO: 978 - DNA, 20 bp, Sus scrofa
aaagttaaaccttactttct

SEQ ID NO: 979 - DNA, 20 bp, Sus scrofa
caaagttaaaccttactttc

SEQ ID NO: 980 - DNA, 20 bp, Sus scrofa
ctaaggctgcccagaaagta

SEQ ID NO: 981 - DNA, 20 bp, Sus scrofa
taaggtttaactttgacctt

SEQ ID NO: 982 - DNA, 20 bp, Sus scrofa
catcatgcgatgtattccaa

SEQ ID NO: 983 - DNA, 20 bp, Sus scrofa
aattaggcagtaagtcagtc

SEQ ID NO: 984 - DNA, 20 bp, Sus scrofa
agactgacttactgcctaat

SEQ ID NO: 985 - DNA, 20 bp, Sus scrofa
gactgacttactgcctaatt

SEQ ID NO: 986 - DNA, 20 bp, Sus scrofa
caggctacttgaacccaatt

SEQ ID NO: 987 - DNA, 20 bp, Sus scrofa
cataaactggagttaatatc

SEQ ID NO: 988 - DNA, 20 bp, Sus scrofa
cctggtaggcttgcataaac

SEQ ID NO: 989 - DNA, 20 bp, Sus scrofa
ccagtttatgcaagcctacc

SEQ ID NO: 990 - DNA, 20 bp, Sus scrofa
cagtttatgcaagcctacca

SEQ ID NO: 991 - DNA, 20 bp, Sus scrofa
tctgcccctggatccctggt

SEQ ID NO: 992 - DNA, 20 bp, Sus scrofa
attttctgcccctggatccc

SEQ ID NO: 993 - DNA, 20 bp, Sus scrofa
tgcaagcctaccagggatcc

SEQ ID NO: 994 - DNA, 20 bp, Sus scrofa
gcaagcctaccagggatcca

SEQ ID NO: 995 - DNA, 20 bp, Sus scrofa
caagcctaccagggatccag

SEQ ID NO: 996 - DNA, 20 bp, Sus scrofa
catgctcaattttctgcccc

SEQ ID NO: 997 - DNA, 20 bp, Sus scrofa
cagtactgaccatgactata

SEQ ID NO: 998 - DNA, 20 bp, Sus scrofa
acagtactgaccatgactat

SEQ ID NO: 999 - DNA, 20 bp, Sus scrofa
gcatgagttccctatagtca

SEQ ID NO: 1000 - DNA, 20 bp, Sus scrofa
ggtcagtactgttttgttac

SEQ ID NO: 1001 - DNA, 20 bp, Sus scrofa
tcaacactaccatcaagaac

SEQ ID NO: 1002 - DNA, 20 bp, Sus scrofa
ctcaacactaccatcaagaa

SEQ ID NO: 1003 - DNA, 20 bp, Sus scrofa
tactggattcccgttcttga

SEQ ID NO: 1004 - DNA, 20 bp, Sus scrofa
tgatggtagtgttgagcctg

SEQ ID NO: 1005 - DNA, 20 bp, Sus scrofa
gatggtagtgttgagcctga

SEQ ID NO: 1006 - DNA, 20 bp, Sus scrofa
atggtagtgttgagcctgag

SEQ ID NO: 1007 - DNA, 20 bp, Sus scrofa
agcttcactgtgaacccctc

SEQ ID NO: 1008 - DNA, 20 bp, Sus scrofa
tgaggggttcacagtgaagc

SEQ ID NO: 1009 - DNA, 20 bp, Sus scrofa
gaggggttcacagtgaagct

SEQ ID NO: 1010 - DNA, 20 bp, Sus scrofa
ttcacagtgaagctgggtag

SEQ ID NO: 1011 - DNA, 20 bp, Sus scrofa
gctgggtagtggaaccatgc

SEQ ID NO: 1012 - DNA, 20 bp, Sus scrofa
cattcaaactcaggcctgca

SEQ ID NO: 1013 - DNA, 20 bp, Sus scrofa
ggcaggaagcattcaaactc

SEQ ID NO: 1014 - DNA, 20 bp, Sus scrofa
gttaacttatcttttgtggc

SEQ ID NO: 1015 - DNA, 20 bp, Sus scrofa
gcaggttaacttatcttttg

SEQ ID NO: 1016 - DNA, 20 bp, Sus scrofa
aaatcaaggatcaaagaggc

SEQ ID NO: 1017 - DNA, 20 bp, Sus scrofa
gaggaaatcaaggatcaaag

SEQ ID NO: 1018 - DNA, 20 bp, Sus scrofa
ttttacaagcgaggaaatca

SEQ ID NO: 1019 - DNA, 20 bp, Sus scrofa
ttagtcccattttacaagcg

SEQ ID NO: 1020 - DNA, 20 bp, Sus scrofa
tgatttcctcgcttgtaaaa

SEQ ID NO: 1021 - DNA, 20 bp, Sus scrofa
gatttcctcgcttgtaaaat

SEQ ID NO: 1022 - DNA, 20 bp, Sus scrofa
taatgagtcagtgacaaaac

SEQ ID NO: 1023 - DNA, 20 bp, Sus scrofa
acccgagggacagatcaggc

SEQ ID NO: 1024 - DNA, 20 bp, Sus scrofa
gagcacccgagggacagatc

SEQ ID NO: 1025 - DNA, 20 bp, Sus scrofa
aaccggcctgatctgtccct

SEQ ID NO: 1026 - DNA, 20 bp, Sus scrofa
accggcctgatctgtccctc

SEQ ID NO: 1027 - DNA, 20 bp, Sus scrofa
atcacacactgagcacccga

SEQ ID NO: 1028 - DNA, 20 bp, Sus scrofa
tatcacacactgagcacccg

SEQ ID NO: 1029 - DNA, 20 bp, Sus scrofa
tgttattctcagagagatat

SEQ ID NO: 1030 - DNA, 20 bp, Sus scrofa
agagatattggagtgtgatg

SEQ ID NO: 1031 - DNA, 20 bp, Sus scrofa
gcacaactttgagcttttct

SEQ ID NO: 1032 - DNA, 20 bp, Sus scrofa
cacaactttgagcttttcta

SEQ ID NO: 1033 - DNA, 20 bp, Sus scrofa
tagagaaaaacaacaatagc

SEQ ID NO: 1034 - DNA, 20 bp, Sus scrofa
aactgccccaggcatagcat

SEQ ID NO: 1035 - DNA, 20 bp, Sus scrofa
caactgccccaggcatagca

SEQ ID NO: 1036 - DNA, 20 bp, Sus scrofa
tatagtacccatgctatgcc

SEQ ID NO: 1037 - DNA, 20 bp, Sus scrofa
atagtacccatgctatgcct

SEQ ID NO: 1038 - DNA, 20 bp, Sus scrofa
tagtacccatgctatgcctg

SEQ ID NO: 1039 - DNA, 20 bp, Sus scrofa
aatccacttacaactgcccc

SEQ ID NO: 1040 - DNA, 20 bp, Sus scrofa
atgcctggggcagttgtaag

SEQ ID NO: 1041 - DNA, 20 bp, Sus scrofa
attacacaaatcaattaatt

SEQ ID NO: 1042 - DNA, 20 bp, Sus scrofa
tgcctcacagtgctgctgtg

SEQ ID NO: 1043 - DNA, 20 bp, Sus scrofa
ctgcctcacagtgctgctgt

SEQ ID NO: 1044 - DNA, 20 bp, Sus scrofa
cctgcctcacagtgctgctg

SEQ ID NO: 1045 - DNA, 20 bp, Sus scrofa
gtccccacagcagcactgtg

SEQ ID NO: 1046 - DNA, 20 bp, Sus scrofa
ccacagcagcactgtgaggc

SEQ ID NO: 1047 - DNA, 20 bp, Sus scrofa
atgtgtgatataaggataat

SEQ ID NO: 1048 - DNA, 20 bp, Sus scrofa
aatctcctatgtgtgatata

SEQ ID NO: 1049 - DNA, 20 bp, Sus scrofa
attatccttatatcacacat

SEQ ID NO: 1050 - DNA, 20 bp, Sus scrofa
atatcacacataggagattg

SEQ ID NO: 1051 - DNA, 20 bp, Sus scrofa
aggcataaagatgttatcac

SEQ ID NO: 1052 - DNA, 20 bp, Sus scrofa
ggggaggcagtaaagagtgc

SEQ ID NO: 1053 - DNA, 20 bp, Sus scrofa
aaataagggggcttcagggg

SEQ ID NO: 1054 - DNA, 20 bp, Sus scrofa
tacaaataagggggcttcag

SEQ ID NO: 1055 - DNA, 20 bp, Sus scrofa
ttacaaataagggggcttca

SEQ ID NO: 1056 - DNA, 20 bp, Sus scrofa
attacaaataagggggcttc

SEQ ID NO: 1057 - DNA, 20 bp, Sus scrofa
accgtatattacaaataagg

SEQ ID NO: 1058 - DNA, 20 bp, Sus scrofa
caccgtatattacaaataag

SEQ ID NO: 1059 - DNA, 20 bp, Sus scrofa
ccaccgtatattacaaataa

SEQ ID NO: 1060 - DNA, 20 bp, Sus scrofa
cccaccgtatattacaaata

SEQ ID NO: 1061 - DNA, 20 bp, Sus scrofa
gcccccttatttgtaatata

SEQ ID NO: 1062 - DNA, 20 bp, Sus scrofa
cccttatttgtaatatacgg

SEQ ID NO: 1063 - DNA, 20 bp, Sus scrofa
ccttatttgtaatatacggt

SEQ ID NO: 1064 - DNA, 20 bp, Sus scrofa
gtgggaaagagctttttctt

SEQ ID NO: 1065 - DNA, 20 bp, Sus scrofa
ctttttctttggctttaaaa

SEQ ID NO: 1066 - DNA, 20 bp, Sus scrofa
caggcttctctctcataagg

SEQ ID NO: 1067 - DNA, 20 bp, Sus scrofa
acccaggcttctctctcata

SEQ ID NO: 1068 - DNA, 20 bp, Sus scrofa
caccttatgagagagaagcc

SEQ ID NO: 1069 - DNA, 20 bp, Sus scrofa
accttatgagagagaagcct

SEQ ID NO: 1070 - DNA, 20 bp, Sus scrofa
cttcaacccagaggctaccc

SEQ ID NO: 1071 - DNA, 20 bp, Sus scrofa
agagaagcctgggtagcctc

SEQ ID NO: 1072 - DNA, 20 bp, Sus scrofa
gagaagcctgggtagcctct

SEQ ID NO: 1073 - DNA, 20 bp, Sus scrofa
cctcagtatcttcaacccag

SEQ ID NO: 1074 - DNA, 20 bp, Sus scrofa
cctctgggttgaagatactg

SEQ ID NO: 1075 - DNA, 20 bp, Sus scrofa
tgggttgaagatactgaggt

SEQ ID NO: 1076 - DNA, 20 bp, Sus scrofa
gttgaagatactgaggtagg

SEQ ID NO: 1077 - DNA, 20 bp, Sus scrofa
agatactgaggtaggtggtc

SEQ ID NO: 1078 - DNA, 20 bp, Sus scrofa
ggtcaggatcagagactctg

SEQ ID NO: 1079 - DNA, 20 bp, Sus scrofa
atcagagactctgtggattg

SEQ ID NO: 1080 - DNA, 20 bp, Sus scrofa
ctctgtggattgcggtttta

SEQ ID NO: 1081 - DNA, 20 bp, Sus scrofa
tctgtggattgcggttttaa

SEQ ID NO: 1082 - DNA, 20 bp, Sus scrofa
ctgtggattgcggttttaag

SEQ ID NO: 1083 - DNA, 20 bp, Sus scrofa
tgtggattgcggttttaagg

SEQ ID NO: 1084 - DNA, 20 bp, Sus scrofa
caaagtaggaaagtgtaata

SEQ ID NO: 1085 - DNA, 20 bp, Sus scrofa
catattacactttcctactt

SEQ ID NO: 1086 - DNA, 20 bp, Sus scrofa
atattacactttcctacttt

SEQ ID NO: 1087 - DNA, 20 bp, Sus scrofa
gtgttgtgctaacccaaagt

SEQ ID NO: 1088 - DNA, 20 bp, Sus scrofa
ttgggttagcacaacacatc

SEQ ID NO: 1089 - DNA, 20 bp, Sus scrofa
ttagcacaacacatctggtt

SEQ ID NO: 1090 - DNA, 20 bp, Sus scrofa
tggttaggctgaaatgaatc

SEQ ID NO: 1091 - DNA, 20 bp, Sus scrofa
tgaaatgaatctggcctttt

SEQ ID NO: 1092 - DNA, 20 bp, Sus scrofa
tgtgtcccccgacacctaaa

SEQ ID NO: 1093 - DNA, 20 bp, Sus scrofa
gaatctggccttttaggtgt

SEQ ID NO: 1094 - DNA, 20 bp, Sus scrofa
aatctggccttttaggtgtc

SEQ ID NO: 1095 - DNA, 20 bp, Sus scrofa
atctggccttttaggtgtcg

SEQ ID NO: 1096 - DNA, 20 bp, Sus scrofa
tctggccttttaggtgtcgg

SEQ ID NO: 1097 - DNA, 20 bp, Sus scrofa
tgagtaatgagaagataagc

SEQ ID NO: 1098 - DNA, 20 bp, Sus scrofa
gataagcaggagccactcag

SEQ ID NO: 1099 - DNA, 20 bp, Sus scrofa
atcccatacacaccactgag

SEQ ID NO: 1100 - DNA, 20 bp, Sus scrofa
gagccactcagtggtgtgta

SEQ ID NO: 1101 - DNA, 20 bp, Sus scrofa
agccactcagtggtgtgtat

SEQ ID NO: 1102 - DNA, 20 bp, Sus scrofa
tagatggagactgatgaaag

SEQ ID NO: 1103 - DNA, 20 bp, Sus scrofa
ttcagcttttggtctgtaga

SEQ ID NO: 1104 - DNA, 20 bp, Sus scrofa
tgccaattctgttcagcttt

SEQ ID NO: 1105 - DNA, 20 bp, Sus scrofa
gaccaaaagctgaacagaat

SEQ ID NO: 1106 - DNA, 20 bp, Sus scrofa
aaactaggtcctagaaacta

SEQ ID NO: 1107 - DNA, 20 bp, Sus scrofa
ttggcatgtccttagtttct

SEQ ID NO: 1108 - DNA, 20 bp, Sus scrofa
taaagtgttattggtaaact

SEQ ID NO: 1109 - DNA, 20 bp, Sus scrofa
gatgatccataaagtgttat

SEQ ID NO: 1110 - DNA, 20 bp, Sus scrofa
agtttaccaataacacttta

SEQ ID NO: 1111 - DNA, 20 bp, Sus scrofa
tacccttgaggagttggggg

SEQ ID NO: 1112 - DNA, 20 bp, Sus scrofa
gcctacccttgaggagttgg

SEQ ID NO: 1113 - DNA, 20 bp, Sus scrofa
ggcctacccttgaggagttg

SEQ ID NO: 1114 - DNA, 20 bp, Sus scrofa
tggcctacccttgaggagtt

SEQ ID NO: 1115 - DNA, 20 bp, Sus scrofa
ctggcctacccttgaggagt

SEQ ID NO: 1116 - DNA, 20 bp, Sus scrofa
aatcctcccccaactcctca

SEQ ID NO: 1117 - DNA, 20 bp, Sus scrofa
atcctcccccaactcctcaa

SEQ ID NO: 1118 - DNA, 20 bp, Sus scrofa
ccttgcctggcctacccttg

SEQ ID NO: 1119 - DNA, 20 bp, Sus scrofa
tcccccaactcctcaagggt

SEQ ID NO: 1120 - DNA, 20 bp, Sus scrofa
caactcctcaagggtaggcc

SEQ ID NO: 1121 - DNA, 20 bp, Sus scrofa
cctcaagggtaggccaggca

SEQ ID NO: 1122 - DNA, 20 bp, Sus scrofa
cgagacgacatagccttgcc

SEQ ID NO: 1123 - DNA, 20 bp, Sus scrofa
caggcaaggctatgtcgtct

SEQ ID NO: 1124 - DNA, 20 bp, Sus scrofa
ggctatgtcgtctcggttgc

SEQ ID NO: 1125 - DNA, 20 bp, Sus scrofa
gctatgtcgtctcggttgca

SEQ ID NO: 1126 - DNA, 20 bp, Sus scrofa
ctatgtcgtctcggttgcag

SEQ ID NO: 1127 - DNA, 20 bp, Sus scrofa
gttgcaggggtgaatcatcc

SEQ ID NO: 1128 - DNA, 20 bp, Sus scrofa
caggggtgaatcatccaggt

SEQ ID NO: 1129 - DNA, 20 bp, Sus scrofa
aggggtgaatcatccaggtt

SEQ ID NO: 1130 - DNA, 20 bp, Sus scrofa
tctgaccttctctcccaacc

SEQ ID NO: 1131 - DNA, 20 bp, Sus scrofa
atcatccaggttgggagaga

SEQ ID NO: 1132 - DNA, 20 bp, Sus scrofa
aacccaacagtgaagagtac

SEQ ID NO: 1133 - DNA, 20 bp, Sus scrofa
cagccagtactcttcactgt

SEQ ID NO: 1134 - DNA, 20 bp, Sus scrofa
agccagtactcttcactgtt

SEQ ID NO: 1135 - DNA, 20 bp, Sus scrofa
tccctactgttttacaatgg

SEQ ID NO: 1136 - DNA, 20 bp, Sus scrofa
gtccctactgttttacaatg

SEQ ID NO: 1137 - DNA, 20 bp, Sus scrofa
agtccctactgttttacaat

SEQ ID NO: 1138 - DNA, 20 bp, Sus scrofa
aagtccctactgttttacaa

SEQ ID NO: 1139 - DNA, 20 bp, Sus scrofa
ttcccccattgtaaaacagt

SEQ ID NO: 1140 - DNA, 20 bp, Sus scrofa
tcccccattgtaaaacagta

SEQ ID NO: 1141 - DNA, 20 bp, Sus scrofa
acagtagggactttgaaaat

SEQ ID NO: 1142 - DNA, 20 bp, Sus scrofa
gaaaattggatagactatat

SEQ ID NO: 1143 - DNA, 20 bp, Sus scrofa
aaaattggatagactatatt

SEQ ID NO: 1144 - DNA, 20 bp, Sus scrofa
agactatattgggtcctcag

SEQ ID NO: 1145 - DNA, 20 bp, Sus scrofa
attctggtaagaggccactg

SEQ ID NO: 1146 - DNA, 20 bp, Sus scrofa
tcccaggtgattctggtaag

SEQ ID NO: 1147 - DNA, 20 bp, Sus scrofa
acatgcttcccaggtgattc

SEQ ID NO: 1148 - DNA, 20 bp, Sus scrofa
ggcctcttaccagaatcacc

SEQ ID NO: 1149 - DNA, 20 bp, Sus scrofa
gcctcttaccagaatcacct

SEQ ID NO: 1150 - DNA, 20 bp, Sus scrofa
ctgcattctacatgcttccc

SEQ ID NO: 1151 - DNA, 20 bp, Sus scrofa
ctgggaagcatgtagaatgc

SEQ ID NO: 1152 - DNA, 20 bp, Sus scrofa
gcatgtagaatgcaggttcc

SEQ ID NO: 1153 - DNA, 20 bp, Sus scrofa
caatgcctagcagtggagcc

SEQ ID NO: 1154 - DNA, 20 bp, Sus scrofa
aggttcctggctccactgct

SEQ ID NO: 1155 - DNA, 20 bp, Sus scrofa
actaaaccaatgcctagcag

SEQ ID NO: 1156 - DNA, 20 bp, Sus scrofa
ctggctccactgctaggcat

SEQ ID NO: 1157 - DNA, 20 bp, Sus scrofa
gctaggcattggtttagtac

SEQ ID NO: 1158 - DNA, 20 bp, Sus scrofa
gtactggcattgccaaattt

SEQ ID NO: 1159 - DNA, 20 bp, Sus scrofa
tactggcattgccaaatttt

SEQ ID NO: 1160 - DNA, 20 bp, Sus scrofa
caggcagctcacccaaaatt

SEQ ID NO: 1161 - DNA, 20 bp, Sus scrofa
ttagctcatgatacaaaaac

SEQ ID NO: 1162 - DNA, 20 bp, Sus scrofa
ttgcaatcaatttgatgatg

SEQ ID NO: 1163 - DNA, 20 bp, Sus scrofa
taataacatttcacttaatt

SEQ ID NO: 1164 - DNA, 20 bp, Sus scrofa
ataataacatttcacttaat

SEQ ID NO: 1165 - DNA, 20 bp, Sus scrofa
aattctttgcagggggaagg

SEQ ID NO: 1166 - DNA, 20 bp, Sus scrofa
gaattctttgcagggggaag

SEQ ID NO: 1167 - DNA, 20 bp, Sus scrofa
agaattctttgcagggggaa

SEQ ID NO: 1168 - DNA, 20 bp, Sus scrofa
aagaattctttgcaggggga

SEQ ID NO: 1169 - DNA, 20 bp, Sus scrofa
agataagaattctttgcagg

SEQ ID NO: 1170 - DNA, 20 bp, Sus scrofa
gagataagaattctttgcag

SEQ ID NO: 1171 - DNA, 20 bp, Sus scrofa
ggagataagaattctttgca

SEQ ID NO: 1172 - DNA, 20 bp, Sus scrofa
aggagataagaattctttgc

SEQ ID NO: 1173 - DNA, 20 bp, Sus scrofa
tttttggtaataaaggtcta

SEQ ID NO: 1174 - DNA, 20 bp, Sus scrofa
tacaatttttttggtaataa

SEQ ID NO: 1175 - DNA, 20 bp, Sus scrofa
tataataagtacaatttttt

SEQ ID NO: 1176 - DNA, 20 bp, Sus scrofa
taatattgacagtactacat

SEQ ID NO: 1177 - DNA, 20 bp, Sus scrofa
gtactgtcaatattacctct

SEQ ID NO: 1178 - DNA, 20 bp, Sus scrofa
aaacagtaaactttacctag

SEQ ID NO: 1179 - DNA, 20 bp, Sus scrofa
tctaggtaaagtttactgtt

SEQ ID NO: 1180 - DNA, 20 bp, Sus scrofa
tacagaagtttgataatctc

SEQ ID NO: 1181 - DNA, 20 bp, Sus scrofa
atctctggtttagtagattg

SEQ ID NO: 1182 - DNA, 20 bp, Sus scrofa
tctctggtttagtagattgt

SEQ ID NO: 1183 - DNA, 20 bp, Sus scrofa
ctctggtttagtagattgtg

SEQ ID NO: 1184 - DNA, 20 bp, Sus scrofa
ggtttagtagattgtgggga

SEQ ID NO: 1185 - DNA, 20 bp, Sus scrofa
tagattgtggggaaggactt

SEQ ID NO: 1186 - DNA, 20 bp, Sus scrofa
agattgtggggaaggacttt

SEQ ID NO: 1187 - DNA, 20 bp, Sus scrofa
tggggaaggactttgggatc

SEQ ID NO: 1188 - DNA, 20 bp, Sus scrofa
ggggaaggactttgggatct

SEQ ID NO: 1189 - DNA, 20 bp, Sus scrofa
ttttatatttttatcttttt

SEQ ID NO: 1190 - DNA, 20 bp, Sus scrofa
tttatatttttatcttttta

SEQ ID NO: 1191 - DNA, 20 bp, Sus scrofa
tgggaatctccatatgcaga

SEQ ID NO: 1192 - DNA, 20 bp, Sus scrofa
ctgggaatctccatatgcag

SEQ ID NO: 1193 - DNA, 20 bp, Sus scrofa
agggatgcaccctctgcata

SEQ ID NO: 1194 - DNA, 20 bp, Sus scrofa
ctctgcatatggagattccc

SEQ ID NO: 1195 - DNA, 20 bp, Sus scrofa
catatggagattcccaggct

SEQ ID NO: 1196 - DNA, 20 bp, Sus scrofa
atatggagattcccaggcta

SEQ ID NO: 1197 - DNA, 20 bp, Sus scrofa
tctgattcgacccctagcct

SEQ ID NO: 1198 - DNA, 20 bp, Sus scrofa
tatggagattcccaggctag

SEQ ID NO: 1199 - DNA, 20 bp, Sus scrofa
ctctgattcgacccctagcc

SEQ ID NO: 1200 - DNA, 20 bp, Sus scrofa
gctgtggctgtggtgtaggc

SEQ ID NO: 1201 - DNA, 20 bp, Sus scrofa
tgttgctgtggctgtggtgt

SEQ ID NO: 1202 - DNA, 20 bp, Sus scrofa
acctggtgttgctgtggctg

SEQ ID NO: 1203 - DNA, 20 bp, Sus scrofa
gctcagacctggtgttgctg

SEQ ID NO: 1204 - DNA, 20 bp, Sus scrofa
accacagccacagcaacacc

SEQ ID NO: 1205 - DNA, 20 bp, Sus scrofa
ttgcagacatggctcagacc

SEQ ID NO: 1206 - DNA, 20 bp, Sus scrofa
tgtggtgtaggttgcagaca

SEQ ID NO: 1207 - DNA, 20 bp, Sus scrofa
attgctgtgagctgtggtgt

SEQ ID NO: 1208 - DNA, 20 bp, Sus scrofa
tccagcattgctgtgagctg

SEQ ID NO: 1209 - DNA, 20 bp, Sus scrofa
accacagctcacagcaatgc

SEQ ID NO: 1210 - DNA, 20 bp, Sus scrofa
tggccttgctcagtggcata

SEQ ID NO: 1211 - DNA, 20 bp, Sus scrofa
tgatccctggccttgctcag

SEQ ID NO: 1212 - DNA, 20 bp, Sus scrofa
gatccttatgccactgagca

SEQ ID NO: 1213 - DNA, 20 bp, Sus scrofa
ttatgccactgagcaaggcc

SEQ ID NO: 1214 - DNA, 20 bp, Sus scrofa
tatgccactgagcaaggcca

SEQ ID NO: 1215 - DNA, 20 bp, Sus scrofa
gaggatgcagctttgatccc

SEQ ID NO: 1216 - DNA, 20 bp, Sus scrofa
ggatcaaagctgcatcctca

SEQ ID NO: 1217 - DNA, 20 bp, Sus scrofa
gaatatgactagtatccatg

SEQ ID NO: 1218 - DNA, 20 bp, Sus scrofa
tcatttttgctgagccatga

SEQ ID NO: 1219 - DNA, 20 bp, Sus scrofa
catttttgctgagccatgat

SEQ ID NO: 1220 - DNA, 20 bp, Sus scrofa
aatttagggagttcccatca

SEQ ID NO: 1221 - DNA, 20 bp, Sus scrofa
caattaaaaaaaaaaattta

SEQ ID NO: 1222 - DNA, 20 bp, Sus scrofa
acaattaaaaaaaaaaattt

SEQ ID NO: 1223 - DNA, 20 bp, Sus scrofa
ttaagcaccaccaaaaagaa

SEQ ID NO: 1224 - DNA, 20 bp, Sus scrofa
atgtgacaagcctttctttt

SEQ ID NO: 1225 - DNA, 20 bp, Sus scrofa
tgacaagcctttctttttgg

SEQ ID NO: 1226 - DNA, 20 bp, Sus scrofa
ttctttttggtggtgcttaa

SEQ ID NO: 1227 - DNA, 20 bp, Sus scrofa
tctttttggtggtgcttaaa

SEQ ID NO: 1228 - DNA, 20 bp, Sus scrofa
ctttttggtggtgcttaaag

SEQ ID NO: 1229 - DNA, 20 bp, Sus scrofa
tttttggtggtgcttaaagg

SEQ ID NO: 1230 - DNA, 20 bp, Sus scrofa
gcttaaagggggtctttcca

SEQ ID NO: 1231 - DNA, 20 bp, Sus scrofa
agggcacatgtaaaaggcct

SEQ ID NO: 1232 - DNA, 20 bp, Sus scrofa
agagaaagggcacatgtaaa

SEQ ID NO: 1233 - DNA, 20 bp, Sus scrofa
ctacatatcaactagagaaa

SEQ ID NO: 1234 - DNA, 20 bp, Sus scrofa
actacatatcaactagagaa

SEQ ID NO: 1235 - DNA, 20 bp, Sus scrofa
tttctctagttgatatgtag

SEQ ID NO: 1236 - DNA, 20 bp, Sus scrofa
agttgatatgtagtggaaat

SEQ ID NO: 1237 - DNA, 20 bp, Sus scrofa
tctcttcttatggatgttca

SEQ ID NO: 1238 - DNA, 20 bp, Sus scrofa
aagtactacttctcttctta

SEQ ID NO: 1239 - DNA, 20 bp, Sus scrofa
agagaagtagtacttactgc

SEQ ID NO: 1240 - DNA, 20 bp, Sus scrofa
gagaataacttctgaataga

SEQ ID NO: 1241 - DNA, 20 bp, Sus scrofa
aagttattctctgtaaccaa

SEQ ID NO: 1242 - DNA, 20 bp, Sus scrofa
gaaagataaaaaatttccat

SEQ ID NO: 1243 - DNA, 20 bp, Sus scrofa
catattcaaaatatttcaaa

SEQ ID NO: 1244 - DNA, 20 bp, Sus scrofa
ttgtatatcttgtagttaaa

SEQ ID NO: 1245 - DNA, 20 bp, Sus scrofa
tgaagacatctaaatcttaa

SEQ ID NO: 1246 - DNA, 20 bp, Sus scrofa
ttgaagacatctaaatctta

SEQ ID NO: 1247 - DNA, 20 bp, Sus scrofa
ttagatgtcttcaaaactag

SEQ ID NO: 1248 - DNA, 20 bp, Sus scrofa
tagatgtcttcaaaactaga

SEQ ID NO: 1249 - DNA, 20 bp, Sus scrofa
tgtcttcaaaactagaggga

SEQ ID NO: 1250 - DNA, 20 bp, Sus scrofa
ctgcaacagtttgagctttg

SEQ ID NO: 1251 - DNA, 20 bp, Sus scrofa
tttgagctttgaggtccaga

SEQ ID NO: 1252 - DNA, 20 bp, Sus scrofa
tacacagctactgcaccttc

SEQ ID NO: 1253 - DNA, 20 bp, Sus scrofa
aggtgcagtagctgtgtacc

SEQ ID NO: 1254 - DNA, 20 bp, Sus scrofa
agagtctgatgtcagtcacc

SEQ ID NO: 1255 - DNA, 20 bp, Sus scrofa
gattatccgcaggttttcaa

SEQ ID NO: 1256 - DNA, 20 bp, Sus scrofa
cacagaccattgaaaacctg

SEQ ID NO: 1257 - DNA, 20 bp, Sus scrofa
gagattccaggattatccgc

SEQ ID NO: 1258 - DNA, 20 bp, Sus scrofa
tgaaaacctgcggataatcc

SEQ ID NO: 1259 - DNA, 20 bp, Sus scrofa
aggcccaaactagagattcc

SEQ ID NO: 1260 - DNA, 20 bp, Sus scrofa
taatcctggaatctctagtt

SEQ ID NO: 1261 - DNA, 20 bp, Sus scrofa
aatcctggaatctctagttt

SEQ ID NO: 1262 - DNA, 20 bp, Sus scrofa
tgccctggtggaagaggagc

SEQ ID NO: 1263 - DNA, 20 bp, Sus scrofa
gcaatatgccctggtggaag

SEQ ID NO: 1264 - DNA, 20 bp, Sus scrofa
gggcctgctcctcttccacc

SEQ ID NO: 1265 - DNA, 20 bp, Sus scrofa
ggcctgctcctcttccacca

SEQ ID NO: 1266 - DNA, 20 bp, Sus scrofa
ccccaggcaatatgccctgg

SEQ ID NO: 1267 - DNA, 20 bp, Sus scrofa
attccccaggcaatatgccc

SEQ ID NO: 1268 - DNA, 20 bp, Sus scrofa
ttccaccagggcatattgcc

SEQ ID NO: 1269 - DNA, 20 bp, Sus scrofa
tccaccagggcatattgcct

SEQ ID NO: 1270 - DNA, 20 bp, Sus scrofa
ccaccagggcatattgcctg

SEQ ID NO: 1271 - DNA, 20 bp, Sus scrofa
ttactcttggtacattcccc

SEQ ID NO: 1272 - DNA, 20 bp, Sus scrofa
actcaaagccacattactct

SEQ ID NO: 1273 - DNA, 20 bp, Sus scrofa
ggaatgtaccaagagtaatg

SEQ ID NO: 1274 - DNA, 20 bp, Sus scrofa
agaagttgaaagaagggctc

SEQ ID NO: 1275 - DNA, 20 bp, Sus scrofa
gagactagaagttgaaagaa

SEQ ID NO: 1276 - DNA, 20 bp, Sus scrofa
agagactagaagttgaaaga

SEQ ID NO: 1277 - DNA, 20 bp, Sus scrofa
tttcttccactcattagctc

SEQ ID NO: 1278 - DNA, 20 bp, Sus scrofa
cttgtgcctgagctaatgag

SEQ ID NO: 1279 - DNA, 20 bp, Sus scrofa
ggaagaaatagatgtacgat

SEQ ID NO: 1280 - DNA, 20 bp, Sus scrofa
aaatagatgtacgattggcc

SEQ ID NO: 1281 - DNA, 20 bp, Sus scrofa
gatgtacgattggcctggcc

SEQ ID NO: 1282 - DNA, 20 bp, Sus scrofa
ttattgcctccttcctggcc

SEQ ID NO: 1283 - DNA, 20 bp, Sus scrofa
tacgattggcctggccagga

SEQ ID NO: 1284 - DNA, 20 bp, Sus scrofa
gattggcctggccaggaagg

SEQ ID NO: 1285 - DNA, 20 bp, Sus scrofa
tagatttattgcctccttcc

SEQ ID NO: 1286 - DNA, 20 bp, Sus scrofa
ggaaggaggcaataaatcta

SEQ ID NO: 1287 - DNA, 20 bp, Sus scrofa
gaaggaggcaataaatctaa

SEQ ID NO: 1288 - DNA, 20 bp, Sus scrofa
aaggaggcaataaatctaag

SEQ ID NO: 1289 - DNA, 20 bp, Sus scrofa
gcaataaatctaaggggagc

SEQ ID NO: 1290 - DNA, 20 bp, Sus scrofa
aggccacagttatggtgact

SEQ ID NO: 1291 - DNA, 20 bp, Sus scrofa
caggccacagttatggtgac

SEQ ID NO: 1292 - DNA, 20 bp, Sus scrofa
aggcccagtcaccataactg

SEQ ID NO: 1293 - DNA, 20 bp, Sus scrofa
taaagtacaggccacagtta

SEQ ID NO: 1294 - DNA, 20 bp, Sus scrofa
tgtggtttgctgtaaagtac

SEQ ID NO: 1295 - DNA, 20 bp, Sus scrofa
cagagagggaactgggtctg

SEQ ID NO: 1296 - DNA, 20 bp, Sus scrofa
agcagcccagagagggaact

SEQ ID NO: 1297 - DNA, 20 bp, Sus scrofa
cagcagcccagagagggaac

SEQ ID NO: 1298 - DNA, 20 bp, Sus scrofa
cacagacccagttccctctc

SEQ ID NO: 1299 - DNA, 20 bp, Sus scrofa
acagacccagttccctctct

SEQ ID NO: 1300 - DNA, 20 bp, Sus scrofa
gtgcagcagcagcccagaga

SEQ ID NO: 1301 - DNA, 20 bp, Sus scrofa
ggtgcagcagcagcccagag

SEQ ID NO: 1302 - DNA, 20 bp, Sus scrofa
aagtcatcttgagaggctgg

SEQ ID NO: 1303 - DNA, 20 bp, Sus scrofa
agtaagtcatcttgagaggc

SEQ ID NO: 1304 - DNA, 20 bp, Sus scrofa
ctagagtaagtcatcttgag

SEQ ID NO: 1305 - DNA, 20 bp, Sus scrofa
tgcctctattacaaataagg

SEQ ID NO: 1306 - DNA, 20 bp, Sus scrofa
aggtgcctctattacaaata

SEQ ID NO: 1307 - DNA, 20 bp, Sus scrofa
agcctccttatttgtaatag

SEQ ID NO: 1308 - DNA, 20 bp, Sus scrofa
ccagcccccatagctcaatc

SEQ ID NO: 1309 - DNA, 20 bp, Sus scrofa
agaggcacctgattgagcta

SEQ ID NO: 1310 - DNA, 20 bp, Sus scrofa
gaggcacctgattgagctat

SEQ ID NO: 1311 - DNA, 20 bp, Sus scrofa
aggcacctgattgagctatg

SEQ ID NO: 1312 - DNA, 20 bp, Sus scrofa
ggcacctgattgagctatgg

SEQ ID NO: 1313 - DNA, 20 bp, Sus scrofa
cctgattgagctatgggggc

SEQ ID NO: 1314 - DNA, 20 bp, Sus scrofa
attaatacaaaacgaagttc

SEQ ID NO: 1315 - DNA, 20 bp, Sus scrofa
ctgagatttttatttcaata

SEQ ID NO: 1316 - DNA, 20 bp, Sus scrofa
catattgaaataaaaatctc

SEQ ID NO: 1317 - DNA, 20 bp, Sus scrofa
atattgaaataaaaatctca

SEQ ID NO: 1318 - DNA, 20 bp, Sus scrofa
aataaaaatctcagggctgt

SEQ ID NO: 1319 - DNA, 20 bp, Sus scrofa
gggctgttggtaatccttta

SEQ ID NO: 1320 - DNA, 20 bp, Sus scrofa
atcctacacaaattccataa

SEQ ID NO: 1321 - DNA, 20 bp, Sus scrofa
atcctttatggaatttgtgt

SEQ ID NO: 1322 - DNA, 20 bp, Sus scrofa
agagggcaggcacactagta

SEQ ID NO: 1323 - DNA, 20 bp, Sus scrofa
tacaccaaggtagagagggc

SEQ ID NO: 1324 - DNA, 20 bp, Sus scrofa
gtgatacaccaaggtagaga

SEQ ID NO: 1325 - DNA, 20 bp, Sus scrofa
agtgatacaccaaggtagag

SEQ ID NO: 1326 - DNA, 20 bp, Sus scrofa
tgtgcctgccctctctacct

SEQ ID NO: 1327 - DNA, 20 bp, Sus scrofa
ctttcctaagtgatacacca

SEQ ID NO: 1328 - DNA, 20 bp, Sus scrofa
tctaccttggtgtatcactt

SEQ ID NO: 1329 - DNA, 20 bp, Sus scrofa
cttggtgtatcacttaggaa

SEQ ID NO: 1330 - DNA, 20 bp, Sus scrofa
gcagaaagcttgttgctgag

SEQ ID NO: 1331 - DNA, 20 bp, Sus scrofa
tgctgagtggacatgagctc

SEQ ID NO: 1332 - DNA, 20 bp, Sus scrofa
gagctctggtcgaatgagct

SEQ ID NO: 1333 - DNA, 20 bp, Sus scrofa
agatttcaggccaaacaact

SEQ ID NO: 1334 - DNA, 20 bp, Sus scrofa
atgagcttggcccagttgtt

SEQ ID NO: 1335 - DNA, 20 bp, Sus scrofa
tagatttcaggccaaacaac

SEQ ID NO: 1336 - DNA, 20 bp, Sus scrofa
tcttcaccaagttagatttc

SEQ ID NO: 1337 - DNA, 20 bp, Sus scrofa
gtttggcctgaaatctaact

SEQ ID NO: 1338 - DNA, 20 bp, Sus scrofa
tgaaatctaacttggtgaag

SEQ ID NO: 1339 - DNA, 20 bp, Sus scrofa
aatctaacttggtgaagagg

SEQ ID NO: 1340 - DNA, 20 bp, Sus scrofa
gaagaggaggctcattactc

SEQ ID NO: 1341 - DNA, 20 bp, Sus scrofa
ctcattactctggtgtccag

SEQ ID NO: 1342 - DNA, 20 bp, Sus scrofa
tcattactctggtgtccaga

SEQ ID NO: 1343 - DNA, 20 bp, Sus scrofa
cattactctggtgtccagag

SEQ ID NO: 1344 - DNA, 20 bp, Sus scrofa
attactctggtgtccagagg

SEQ ID NO: 1345 - DNA, 20 bp, Sus scrofa
ctgtaagggagtaccccctc

SEQ ID NO: 1346 - DNA, 20 bp, Sus scrofa
ggagggcatggcatctgtaa

SEQ ID NO: 1347 - DNA, 20 bp, Sus scrofa
aggagggcatggcatctgta

SEQ ID NO: 1348 - DNA, 20 bp, Sus scrofa
gtgtccagggcaggagggca

SEQ ID NO: 1349 - DNA, 20 bp, Sus scrofa
aatgtgtgtccagggcagga

SEQ ID NO: 1350 - DNA, 20 bp, Sus scrofa
aaatgtgtgtccagggcagg

SEQ ID NO: 1351 - DNA, 20 bp, Sus scrofa
gatgccatgccctcctgccc

SEQ ID NO: 1352 - DNA, 20 bp, Sus scrofa
gcaaaatgtgtgtccagggc

SEQ ID NO: 1353 - DNA, 20 bp, Sus scrofa
cagggcaaaatgtgtgtcca

SEQ ID NO: 1354 - DNA, 20 bp, Sus scrofa
acagggcaaaatgtgtgtcc

SEQ ID NO: 1355 - DNA, 20 bp, Sus scrofa
gctagagcagagggtagaca

SEQ ID NO: 1356 - DNA, 20 bp, Sus scrofa
agctagagcagagggtagac

SEQ ID NO: 1357 - DNA, 20 bp, Sus scrofa
agagcactagctagagcaga

SEQ ID NO: 1358 - DNA, 20 bp, Sus scrofa
tagagcactagctagagcag

SEQ ID NO: 1359 - DNA, 20 bp, Sus scrofa
attgatggaaggtacttctt

SEQ ID NO: 1360 - DNA, 20 bp, Sus scrofa
tggtgaatgagattgatgga

SEQ ID NO: 1361 - DNA, 20 bp, Sus scrofa
gtggtggtgaatgagattga

SEQ ID NO: 1362 - DNA, 20 bp, Sus scrofa
tgtctgtgggaggaaggtgg

SEQ ID NO: 1363 - DNA, 20 bp, Sus scrofa
aactgtctgtgggaggaagg

SEQ ID NO: 1364 - DNA, 20 bp, Sus scrofa
tccaactgtctgtgggagga

SEQ ID NO: 1365 - DNA, 20 bp, Sus scrofa
tttctccaactgtctgtggg

SEQ ID NO: 1366 - DNA, 20 bp, Sus scrofa
ctatttctccaactgtctgt

SEQ ID NO: 1367 - DNA, 20 bp, Sus scrofa
cctatttctccaactgtctg

SEQ ID NO: 1368 - DNA, 20 bp, Sus scrofa
accttcctcccacagacagt

SEQ ID NO: 1369 - DNA, 20 bp, Sus scrofa
ccacagacagttggagaaat

SEQ ID NO: 1370 - DNA, 20 bp, Sus scrofa
cacagacagttggagaaata

SEQ ID NO: 1371 - DNA, 20 bp, Sus scrofa
gtaatataagattcagactc

SEQ ID NO: 1372 - DNA, 20 bp, Sus scrofa
aaatgataaataacccaaca

SEQ ID NO: 1373 - DNA, 20 bp, Sus scrofa
ttaatgaaaacatccttgtt

SEQ ID NO: 1374 - DNA, 20 bp, Sus scrofa
tttaatgaaaacatccttgt

SEQ ID NO: 1375 - DNA, 20 bp, Sus scrofa
ggatgttttcattaaagaga

SEQ ID NO: 1376 - DNA, 20 bp, Sus scrofa
ttcattaaagagatggagtc

SEQ ID NO: 1377 - DNA, 20 bp, Sus scrofa
ttaaagagatggagtctggc

SEQ ID NO: 1378 - DNA, 20 bp, Sus scrofa
taaagagatggagtctggca

SEQ ID NO: 1379 - DNA, 20 bp, Sus scrofa
gagatggagtctggcaggga

SEQ ID NO: 1380 - DNA, 20 bp, Sus scrofa
ggcagggatggaaacttgtg

SEQ ID NO: 1381 - DNA, 20 bp, Sus scrofa
gcagggatggaaacttgtga

SEQ ID NO: 1382 - DNA, 20 bp, Sus scrofa
gaacttctcatttagtaaaa

SEQ ID NO: 1383 - DNA, 20 bp, Sus scrofa
ctgggagactgcagggctag

SEQ ID NO: 1384 - DNA, 20 bp, Sus scrofa
gctgggagactgcagggcta

SEQ ID NO: 1385 - DNA, 20 bp, Sus scrofa
tgctgggagactgcagggct

SEQ ID NO: 1386 - DNA, 20 bp, Sus scrofa
ttctatgctgggagactgca

SEQ ID NO: 1387 - DNA, 20 bp, Sus scrofa
gttctatgctgggagactgc

SEQ ID NO: 1388 - DNA, 20 bp, Sus scrofa
aggacaactggttctatgct

SEQ ID NO: 1389 - DNA, 20 bp, Sus scrofa
caggacaactggttctatgc

SEQ ID NO: 1390 - DNA, 20 bp, Sus scrofa
acaaatgttatcaggacaac

SEQ ID NO: 1391 - DNA, 20 bp, Sus scrofa
tctcattaacaaatgttatc

SEQ ID NO: 1392 - DNA, 20 bp, Sus scrofa
tggatgggacctggtgcagg

SEQ ID NO: 1393 - DNA, 20 bp, Sus scrofa
ctggatgggacctggtgcag

SEQ ID NO: 1394 - DNA, 20 bp, Sus scrofa
tgtctttgtccccctgcacc

SEQ ID NO: 1395 - DNA, 20 bp, Sus scrofa
actggatgggacctggtgca

SEQ ID NO: 1396 - DNA, 20 bp, Sus scrofa
cactggatgggacctggtgc

SEQ ID NO: 1397 - DNA, 20 bp, Sus scrofa
tgtaggcactggatgggacc

SEQ ID NO: 1398 - DNA, 20 bp, Sus scrofa
tggccctgtaggcactggat

SEQ ID NO: 1399 - DNA, 20 bp, Sus scrofa
gtggccctgtaggcactgga

SEQ ID NO: 1400 - DNA, 20 bp, Sus scrofa
gggtgtggccctgtaggcac

SEQ ID NO: 1401 - DNA, 20 bp, Sus scrofa
aggtcccatccagtgcctac

SEQ ID NO: 1402 - DNA, 20 bp, Sus scrofa
ggtcccatccagtgcctaca

SEQ ID NO: 1403 - DNA, 20 bp, Sus scrofa
gatgcagggtgtggccctgt

SEQ ID NO: 1404 - DNA, 20 bp, Sus scrofa
aacacaggggatgcagggtg

SEQ ID NO: 1405 - DNA, 20 bp, Sus scrofa
gtggaaacacaggggatgca

SEQ ID NO: 1406 - DNA, 20 bp, Sus scrofa
agtggaaacacaggggatgc

SEQ ID NO: 1407 - DNA, 20 bp, Sus scrofa
aaatttgagtggaaacacag

SEQ ID NO: 1408 - DNA, 20 bp, Sus scrofa
taaatttgagtggaaacaca

SEQ ID NO: 1409 - DNA, 20 bp, Sus scrofa
ataaatttgagtggaaacac

SEQ ID NO: 1410 - DNA, 20 bp, Sus scrofa
tgaaagaaaataaatttgag

SEQ ID NO: 1411 - DNA, 20 bp, Sus scrofa
tttcagctctgcagctgccc

SEQ ID NO: 1412 - DNA, 20 bp, Sus scrofa
ggcactagatgagtgcacca

SEQ ID NO: 1413 - DNA, 20 bp, Sus scrofa
aggcactagatgagtgcacc

SEQ ID NO: 1414 - DNA, 20 bp, Sus scrofa
ggagcaagttttggtaaaaa

SEQ ID NO: 1415 - DNA, 20 bp, Sus scrofa
ctgctgcctggagcaagttt

SEQ ID NO: 1416 - DNA, 20 bp, Sus scrofa
tttttaccaaaacttgctcc

SEQ ID NO: 1417 - DNA, 20 bp, Sus scrofa
gatcttttagatctgctgcc

SEQ ID NO: 1418 - DNA, 20 bp, Sus scrofa
cattagagtaaatgatagtg

SEQ ID NO: 1419 - DNA, 20 bp, Sus scrofa
acattagagtaaatgatagt

SEQ ID NO: 1420 - DNA, 20 bp, Sus scrofa
cacattagagtaaatgatag

SEQ ID NO: 1421 - DNA, 20 bp, Sus scrofa
cactatcatttactctaatg

SEQ ID NO: 1422 - DNA, 20 bp, Sus scrofa
ctctaatgtggattaaagtt

SEQ ID NO: 1423 - DNA, 20 bp, Sus scrofa
tctaatgtggattaaagttt

SEQ ID NO: 1424 - DNA, 20 bp, Sus scrofa
gtttgggctgtctttcccat

SEQ ID NO: 1425 - DNA, 20 bp, Sus scrofa
tttgggctgtctttcccata

SEQ ID NO: 1426 - DNA, 20 bp, Sus scrofa
ctccaaatgtaaatccctat

SEQ ID NO: 1427 - DNA, 20 bp, Sus scrofa
tctccaaatgtaaatcccta

SEQ ID NO: 1428 - DNA, 20 bp, Sus scrofa
ttcccatagggatttacatt

SEQ ID NO: 1429 - DNA, 20 bp, Sus scrofa
ggatttacatttggagattc

SEQ ID NO: 1430 - DNA, 20 bp, Sus scrofa
tacatttggagattccggtt

SEQ ID NO: 1431 - DNA, 20 bp, Sus scrofa
tggtaatttcctcaccaaac

SEQ ID NO: 1432 - DNA, 20 bp, Sus scrofa
ttggagattccggtttggtg

SEQ ID NO: 1433 - DNA, 20 bp, Sus scrofa
ccaagtgtctaatagctctc

SEQ ID NO: 1434 - DNA, 20 bp, Sus scrofa
ccagagagctattagacact

SEQ ID NO: 1435 - DNA, 20 bp, Sus scrofa
cagagagctattagacactt

SEQ ID NO: 1436 - DNA, 20 bp, Sus scrofa
agctttgtgattaacacact

SEQ ID NO: 1437 - DNA, 20 bp, Sus scrofa
acacacttggacatgttgtt

SEQ ID NO: 1438 - DNA, 20 bp, Sus scrofa
gacatgttgtttggcctctt

SEQ ID NO: 1439 - DNA, 20 bp, Sus scrofa
acatgttgtttggcctcttt

SEQ ID NO: 1440 - DNA, 20 bp, Sus scrofa
gagtaaacagaggcccaaag

SEQ ID NO: 1441 - DNA, 20 bp, Sus scrofa
tctcattttagagtaaacag

SEQ ID NO: 1442 - DNA, 20 bp, Sus scrofa
taaaacatagatcttactat

SEQ ID NO: 1443 - DNA, 20 bp, Sus scrofa
tgtgtatgtttatacatact

SEQ ID NO: 1444 - DNA, 20 bp, Sus scrofa
gtgtgtatgtttatacatac

SEQ ID NO: 1445 - DNA, 20 bp, Sus scrofa
atgtataaacatacacacac

SEQ ID NO: 1446 - DNA, 20 bp, Sus scrofa
gacaatgtgctcccttattt

SEQ ID NO: 1447 - DNA, 20 bp, Sus scrofa
aagtgttttacccaaaataa

SEQ ID NO: 1448 - DNA, 20 bp, Sus scrofa
acaatgtgctcccttatttt

SEQ ID NO: 1449 - DNA, 20 bp, Sus scrofa
aaagtgttttacccaaaata

SEQ ID NO: 1450 - DNA, 20 bp, Sus scrofa
tttcattaacagaagtgttc

SEQ ID NO: 1451 - DNA, 20 bp, Sus scrofa
aagtaatgaaatcgattcat

SEQ ID NO: 1452 - DNA, 20 bp, Sus scrofa
caagtaatgaaatcgattca

SEQ ID NO: 1453 - DNA, 20 bp, Sus scrofa
accacaaaatatctgagtgt

SEQ ID NO: 1454 - DNA, 20 bp, Sus scrofa
aaccacaaaatatctgagtg

SEQ ID NO: 1455 - DNA, 20 bp, Sus scrofa
tcccacactcagatattttg

SEQ ID NO: 1456 - DNA, 20 bp, Sus scrofa
gatattttgtggtttgtttt

SEQ ID NO: 1457 - DNA, 20 bp, Sus scrofa
atattttgtggtttgttttc

SEQ ID NO: 1458 - DNA, 20 bp, Sus scrofa
tattttgtggtttgttttcg

SEQ ID NO: 1459 - DNA, 20 bp, Sus scrofa
tggtttgttttcggggaatg

SEQ ID NO: 1460 - DNA, 20 bp, Sus scrofa
ggtttgttttcggggaatga

SEQ ID NO: 1461 - DNA, 20 bp, Sus scrofa
cgatttcacaaaacagcaaa

SEQ ID NO: 1462 - DNA, 20 bp, Sus scrofa
tttgtgaaatcgttccacca

SEQ ID NO: 1463 - DNA, 20 bp, Sus scrofa
ttgtgaaatcgttccaccaa

SEQ ID NO: 1464 - DNA, 20 bp, Sus scrofa
gaatcactactgacccttgg

SEQ ID NO: 1465 - DNA, 20 bp, Sus scrofa
gaggaatcactactgaccct

SEQ ID NO: 1466 - DNA, 20 bp, Sus scrofa
cgcacagcaaggaaacttgg

SEQ ID NO: 1467 - DNA, 20 bp, Sus scrofa
actcgcacagcaaggaaact

SEQ ID NO: 1468 - DNA, 20 bp, Sus scrofa
agagggccactcgcacagca

SEQ ID NO: 1469 - DNA, 20 bp, Sus scrofa
aagtttccttgctgtgcgag

SEQ ID NO: 1470 - DNA, 20 bp, Sus scrofa
ggaagaacatgcttggtaga

SEQ ID NO: 1471 - DNA, 20 bp, Sus scrofa
tggaagaacatgcttggtag

SEQ ID NO: 1472 - DNA, 20 bp, Sus scrofa
agggggtggaagaacatgct

SEQ ID NO: 1473 - DNA, 20 bp, Sus scrofa
tgacgagagtagagaggggg

SEQ ID NO: 1474 - DNA, 20 bp, Sus scrofa
gggtgacgagagtagagagg

SEQ ID NO: 1475 - DNA, 20 bp, Sus scrofa
cgggtgacgagagtagagag

SEQ ID NO: 1476 - DNA, 20 bp, Sus scrofa
gcgggtgacgagagtagaga

SEQ ID NO: 1477 - DNA, 20 bp, Sus scrofa
agcgggtgacgagagtagag

SEQ ID NO: 1478 - DNA, 20 bp, Sus scrofa
tgagtgatgagggcagcagc

SEQ ID NO: 1479 - DNA, 20 bp, Sus scrofa
ctgagtgatgagggcagcag

SEQ ID NO: 1480 - DNA, 20 bp, Sus scrofa
tgcagtgcactgagtgatga

SEQ ID NO: 1481 - DNA, 20 bp, Sus scrofa
gtgcagtgcactgagtgatg

SEQ ID NO: 1482 - DNA, 20 bp, Sus scrofa
catcactcagtgcactgcac

SEQ ID NO: 1483 - DNA, 20 bp, Sus scrofa
atcactcagtgcactgcact

SEQ ID NO: 1484 - DNA, 20 bp, Sus scrofa
tcccgcgttggaaaatgtcg

SEQ ID NO: 1485 - DNA, 20 bp, Sus scrofa
ttcccgcgttggaaaatgtc

SEQ ID NO: 1486 - DNA, 20 bp, Sus scrofa
tttcccgcgttggaaaatgt

SEQ ID NO: 1487 - DNA, 20 bp, Sus scrofa
agccccgacattttccaacg

SEQ ID NO: 1488 - DNA, 20 bp, Sus scrofa
gccccgacattttccaacgc

SEQ ID NO: 1489 - DNA, 20 bp, Sus scrofa
caaccctctctttcccgcgt

SEQ ID NO: 1490 - DNA, 20 bp, Sus scrofa
ttttccaacgcgggaaagag

SEQ ID NO: 1491 - DNA, 20 bp, Sus scrofa
tttccaacgcgggaaagaga

SEQ ID NO: 1492 - DNA, 20 bp, Sus scrofa
caacgcgggaaagagagggt

SEQ ID NO: 1493 - DNA, 20 bp, Sus scrofa
aacgcgggaaagagagggtt

SEQ ID NO: 1494 - DNA, 20 bp, Sus scrofa
cgggaaagagagggttgggc

SEQ ID NO: 1495 - DNA, 20 bp, Sus scrofa
gggaaagagagggttgggca

SEQ ID NO: 1496 - DNA, 20 bp, Sus scrofa
ggaaagagagggttgggcag

SEQ ID NO: 1497 - DNA, 20 bp, Sus scrofa
gaaagagagggttgggcagg

SEQ ID NO: 1498 - DNA, 20 bp, Sus scrofa
agagagggttgggcaggggg

SEQ ID NO: 1499 - DNA, 20 bp, Sus scrofa
gttgggcagggggaggtctt

SEQ ID NO: 1500 - DNA, 20 bp, Sus scrofa
cagggggaggtctttggcct

SEQ ID NO: 1501 - DNA, 20 bp, Sus scrofa
caggcagtccgaggaggcca

SEQ ID NO: 1502 - DNA, 20 bp, Sus scrofa
gtctttggccttggcctcct

SEQ ID NO: 1503 - DNA, 20 bp, Sus scrofa
cacacccaggcagtccgagg

SEQ ID NO: 1504 - DNA, 20 bp, Sus scrofa
gagcacacccaggcagtccg

SEQ ID NO: 1505 - DNA, 20 bp, Sus scrofa
cttggcctcctcggactgcc

SEQ ID NO: 1506 - DNA, 20 bp, Sus scrofa
ttggcctcctcggactgcct

SEQ ID NO: 1507 - DNA, 20 bp, Sus scrofa
caatgagaaggagcacaccc

SEQ ID NO: 1508 - DNA, 20 bp, Sus scrofa
ctgggtgtgctccttctcat

SEQ ID NO: 1509 - DNA, 20 bp, Sus scrofa
attttacagcgccaatgaga

SEQ ID NO: 1510 - DNA, 20 bp, Sus scrofa
tgtgtgccagactgtgttat

SEQ ID NO: 1511 - DNA, 20 bp, Sus scrofa
atagtgcctataacacagtc

SEQ ID NO: 1512 - DNA, 20 bp, Sus scrofa
gaatgccaacaatggtgttc

SEQ ID NO: 1513 - DNA, 20 bp, Sus scrofa
ttctgccagaacaccattgt

SEQ ID NO: 1514 - DNA, 20 bp, Sus scrofa
gttaaagtgaatgccaacaa

SEQ ID NO: 1515 - DNA, 20 bp, Sus scrofa
aaaaaaaaaagcttatgtta

SEQ ID NO: 1516 - DNA, 20 bp, Sus scrofa
aaaagtaacatttgtttcaa

SEQ ID NO: 1517 - DNA, 20 bp, Sus scrofa
atttgtttcaatggaaaaag

SEQ ID NO: 1518 - DNA, 20 bp, Sus scrofa
agaagctagagtttcaaaca

SEQ ID NO: 1519 - DNA, 20 bp, Sus scrofa
tagagtttcaaacatggcag

SEQ ID NO: 1520 - DNA, 20 bp, Sus scrofa
ttcctgttgaattgcttgtg

SEQ ID NO: 1521 - DNA, 20 bp, Sus scrofa
attcctgttgaattgcttgt

SEQ ID NO: 1522 - DNA, 20 bp, Sus scrofa
cattcctgttgaattgcttg

SEQ ID NO: 1523 - DNA, 20 bp, Sus scrofa
ttccccacaagcaattcaac

SEQ ID NO: 1524 - DNA, 20 bp, Sus scrofa
cacaagcaattcaacaggaa

SEQ ID NO: 1525 - DNA, 20 bp, Sus scrofa
acaagcaattcaacaggaat

SEQ ID NO: 1526 - DNA, 20 bp, Sus scrofa
agcaattcaacaggaatggg

SEQ ID NO: 1527 - DNA, 20 bp, Sus scrofa
gctatagcatctaaacatca

SEQ ID NO: 1528 - DNA, 20 bp, Sus scrofa
cgacttggaatctggtgctg

SEQ ID NO: 1529 - DNA, 20 bp, Sus scrofa
acgacttggaatctggtgct

SEQ ID NO: 1530 - DNA, 20 bp, Sus scrofa
aacgacttggaatctggtgc

SEQ ID NO: 1531 - DNA, 20 bp, Sus scrofa
agcagaaacgacttggaatc

SEQ ID NO: 1532 - DNA, 20 bp, Sus scrofa
taccctcagcagaaacgact

SEQ ID NO: 1533 - DNA, 20 bp, Sus scrofa
attccaagtcgtttctgctg

SEQ ID NO: 1534 - DNA, 20 bp, Sus scrofa
ttccaagtcgtttctgctga

SEQ ID NO: 1535 - DNA, 20 bp, Sus scrofa
atcacaattcatccttttcc

SEQ ID NO: 1536 - DNA, 20 bp, Sus scrofa
tcacaattcatccttttcct

SEQ ID NO: 1537 - DNA, 20 bp, Sus scrofa
acaatgcgctgcccaggaaa

SEQ ID NO: 1538 - DNA, 20 bp, Sus scrofa
gtagtgacaatgcgctgccc

SEQ ID NO: 1539 - DNA, 20 bp, Sus scrofa
agtagagactgaagaaatag

SEQ ID NO: 1540 - DNA, 20 bp, Sus scrofa
agggtggctgggcagtcaag

SEQ ID NO: 1541 - DNA, 20 bp, Sus scrofa
aggaggggtggagggtggct

SEQ ID NO: 1542 - DNA, 20 bp, Sus scrofa
aaggaggggtggagggtggc

SEQ ID NO: 1543 - DNA, 20 bp, Sus scrofa
tgggaaggaggggtggaggg

SEQ ID NO: 1544 - DNA, 20 bp, Sus scrofa
ggctgggaaggaggggtgga

SEQ ID NO: 1545 - DNA, 20 bp, Sus scrofa
tggctgggaaggaggggtgg

SEQ ID NO: 1546 - DNA, 20 bp, Sus scrofa
tgctggctgggaaggagggg

SEQ ID NO: 1547 - DNA, 20 bp, Sus scrofa
ggttgctggctgggaaggag

SEQ ID NO: 1548 - DNA, 20 bp, Sus scrofa
aggttgctggctgggaagga

SEQ ID NO: 1549 - DNA, 20 bp, Sus scrofa
aaggttgctggctgggaagg

SEQ ID NO: 1550 - DNA, 20 bp, Sus scrofa
gggaaggttgctggctggga

SEQ ID NO: 1551 - DNA, 20 bp, Sus scrofa
tgaagggaaggttgctggct

SEQ ID NO: 1552 - DNA, 20 bp, Sus scrofa
gtgaagggaaggttgctggc

SEQ ID NO: 1553 - DNA, 20 bp, Sus scrofa
ctctgtgaagggaaggttgc

SEQ ID NO: 1554 - DNA, 20 bp, Sus scrofa
ccattttctctgtgaaggga

SEQ ID NO: 1555 - DNA, 20 bp, Sus scrofa
atgtccattttctctgtgaa

SEQ ID NO: 1556 - DNA, 20 bp, Sus scrofa
gatgtccattttctctgtga

SEQ ID NO: 1557 - DNA, 20 bp, Sus scrofa
ccttcccttcacagagaaaa

SEQ ID NO: 1558 - DNA, 20 bp, Sus scrofa
cagagaaaatggacatctct

SEQ ID NO: 1559 - DNA, 20 bp, Sus scrofa
gttttgtccgggaatttctt

SEQ ID NO: 1560 - DNA, 20 bp, Sus scrofa
ttggtttcctaagaaattcc

SEQ ID NO: 1561 - DNA, 20 bp, Sus scrofa
gctgggcatgggttttgtcc

SEQ ID NO: 1562 - DNA, 20 bp, Sus scrofa
agctgggcatgggttttgtc

SEQ ID NO: 1563 - DNA, 20 bp, Sus scrofa
aggacagctgagctgggcat

SEQ ID NO: 1564 - DNA, 20 bp, Sus scrofa
aaggacagctgagctgggca

SEQ ID NO: 1565 - DNA, 20 bp, Sus scrofa
actcaaaggacagctgagct

SEQ ID NO: 1566 - DNA, 20 bp, Sus scrofa
gactcaaaggacagctgagc

SEQ ID NO: 1567 - DNA, 20 bp, Sus scrofa
gcaaaagaggtaagactcaa

SEQ ID NO: 1568 - DNA, 20 bp, Sus scrofa
agataactgaagggcaaaag

SEQ ID NO: 1569 - DNA, 20 bp, Sus scrofa
gaaggaaaaagataactgaa

SEQ ID NO: 1570 - DNA, 20 bp, Sus scrofa
agaaggaaaaagataactga

SEQ ID NO: 1571 - DNA, 20 bp, Sus scrofa
ttcagttatctttttccttc

SEQ ID NO: 1572 - DNA, 20 bp, Sus scrofa
tcagttatctttttccttct

SEQ ID NO: 1573 - DNA, 20 bp, Sus scrofa
agagcagctaggtgcccaga

SEQ ID NO: 1574 - DNA, 20 bp, Sus scrofa
ggacccaaaggagagcagct

SEQ ID NO: 1575 - DNA, 20 bp, Sus scrofa
ggcacctagctgctctcctt

SEQ ID NO: 1576 - DNA, 20 bp, Sus scrofa
gcacctagctgctctccttt

SEQ ID NO: 1577 - DNA, 20 bp, Sus scrofa
caagcttgagaaggacccaa

SEQ ID NO: 1578 - DNA, 20 bp, Sus scrofa
aaaacatcccaagcttgaga

SEQ ID NO: 1579 - DNA, 20 bp, Sus scrofa
ctttgggtccttctcaagct

SEQ ID NO: 1580 - DNA, 20 bp, Sus scrofa
tttgggtccttctcaagctt

SEQ ID NO: 1581 - DNA, 20 bp, Sus scrofa
cttcctacttgctttaagat

SEQ ID NO: 1582 - DNA, 20 bp, Sus scrofa
tcttcctacttgctttaaga

SEQ ID NO: 1583 - DNA, 20 bp, Sus scrofa
tttcccatcttaaagcaagt

SEQ ID NO: 1584 - DNA, 20 bp, Sus scrofa
ttgatcgtctctttagctac

SEQ ID NO: 1585 - DNA, 20 bp, Sus scrofa
tgatcgtctctttagctact

SEQ ID NO: 1586 - DNA, 20 bp, Sus scrofa
gctgcaggtgtggcactaaa

SEQ ID NO: 1587 - DNA, 20 bp, Sus scrofa
aacttcccttgctgcaggtg

SEQ ID NO: 1588 - DNA, 20 bp, Sus scrofa
ttagtgccacacctgcagca

SEQ ID NO: 1589 - DNA, 20 bp, Sus scrofa
ctgggaacttcccttgctgc

SEQ ID NO: 1590 - DNA, 20 bp, Sus scrofa
tagtgccacacctgcagcaa

SEQ ID NO: 1591 - DNA, 20 bp, Sus scrofa
ctgcagcaagggaagttccc

SEQ ID NO: 1592 - DNA, 20 bp, Sus scrofa
gcaagggaagttcccaggct

SEQ ID NO: 1593 - DNA, 20 bp, Sus scrofa
caagggaagttcccaggcta

SEQ ID NO: 1594 - DNA, 20 bp, Sus scrofa
tccaattagacccctagcct

SEQ ID NO: 1595 - DNA, 20 bp, Sus scrofa
aagggaagttcccaggctag

SEQ ID NO: 1596 - DNA, 20 bp, Sus scrofa
ttccaattagacccctagcc

SEQ ID NO: 1597 - DNA, 20 bp, Sus scrofa
tcccaggctaggggtctaat

SEQ ID NO: 1598 - DNA, 20 bp, Sus scrofa
ctaattggaactgcagctgc

SEQ ID NO: 1599 - DNA, 20 bp, Sus scrofa
gttgccataagctgtggtgt

SEQ ID NO: 1600 - DNA, 20 bp, Sus scrofa
tctggtgttgccataagctg

SEQ ID NO: 1601 - DNA, 20 bp, Sus scrofa
ctggcctacaccacagctta

SEQ ID NO: 1602 - DNA, 20 bp, Sus scrofa
tcgttcagtcggtggggatc

SEQ ID NO: 1603 - DNA, 20 bp, Sus scrofa
ctggcctcgttcagtcggtg

SEQ ID NO: 1604 - DNA, 20 bp, Sus scrofa
cctggcctcgttcagtcggt

SEQ ID NO: 1605 - DNA, 20 bp, Sus scrofa
ccctggcctcgttcagtcgg

SEQ ID NO: 1606 - DNA, 20 bp, Sus scrofa
aatccctggcctcgttcagt

SEQ ID NO: 1607 - DNA, 20 bp, Sus scrofa
agatccccaccgactgaacg

SEQ ID NO: 1608 - DNA, 20 bp, Sus scrofa
cccaccgactgaacgaggcc

SEQ ID NO: 1609 - DNA, 20 bp, Sus scrofa
ccaccgactgaacgaggcca

SEQ ID NO: 1610 - DNA, 20 bp, Sus scrofa
gaggatgtgggttcaatccc

SEQ ID NO: 1611 - DNA, 20 bp, Sus scrofa
actagcatccatgaggatgt

SEQ ID NO: 1612 - DNA, 20 bp, Sus scrofa
aactagcatccatgaggatg

SEQ ID NO: 1613 - DNA, 20 bp, Sus scrofa
ggattgaacccacatcctca

SEQ ID NO: 1614 - DNA, 20 bp, Sus scrofa
aaatccaactagcatccatg

SEQ ID NO: 1615 - DNA, 20 bp, Sus scrofa
acatcctcatggatgctagt

SEQ ID NO: 1616 - DNA, 20 bp, Sus scrofa
ttgtttctgctgtgccacaa

SEQ ID NO: 1617 - DNA, 20 bp, Sus scrofa
tgtttctgctgtgccacaac

SEQ ID NO: 1618 - DNA, 20 bp, Sus scrofa
aaaaagagaagttcccgttg

SEQ ID NO: 1619 - DNA, 20 bp, Sus scrofa
tcaggaagtttgaacataaa

SEQ ID NO: 1620 - DNA, 20 bp, Sus scrofa
aagttacagtcagacacttc

SEQ ID NO: 1621 - DNA, 20 bp, Sus scrofa
gaggtgtaagagaagtcagc

SEQ ID NO: 1622 - DNA, 20 bp, Sus scrofa
gaattggactgaggaggctg

SEQ ID NO: 1623 - DNA, 20 bp, Sus scrofa
gttcaggaattggactgagg

SEQ ID NO: 1624 - DNA, 20 bp, Sus scrofa
gcagttcaggaattggactg

SEQ ID NO: 1625 - DNA, 20 bp, Sus scrofa
ttggggagcagttcaggaat

SEQ ID NO: 1626 - DNA, 20 bp, Sus scrofa
tgggatttggggagcagttc

SEQ ID NO: 1627 - DNA, 20 bp, Sus scrofa
ataaaggctattgggatttg

SEQ ID NO: 1628 - DNA, 20 bp, Sus scrofa
aataaaggctattgggattt

SEQ ID NO: 1629 - DNA, 20 bp, Sus scrofa
caataaaggctattgggatt

SEQ ID NO: 1630 - DNA, 20 bp, Sus scrofa
aaaagacaataaaggctatt

SEQ ID NO: 1631 - DNA, 20 bp, Sus scrofa
taaaagacaataaaggctat

SEQ ID NO: 1632 - DNA, 20 bp, Sus scrofa
agtcatgtaaaagacaataa

SEQ ID NO: 1633 - DNA, 20 bp, Sus scrofa
aggaaggtcaagggctgcta

SEQ ID NO: 1634 - DNA, 20 bp, Sus scrofa
gtcaagggtaggaaggtcaa

SEQ ID NO: 1635 - DNA, 20 bp, Sus scrofa
ggtcaagggtaggaaggtca

SEQ ID NO: 1636 - DNA, 20 bp, Sus scrofa
catgaaggtcaagggtagga

SEQ ID NO: 1637 - DNA, 20 bp, Sus scrofa
acctcatgaaggtcaagggt

SEQ ID NO: 1638 - DNA, 20 bp, Sus scrofa
acacacctcatgaaggtcaa

SEQ ID NO: 1639 - DNA, 20 bp, Sus scrofa
aacacacctcatgaaggtca

SEQ ID NO: 1640 - DNA, 20 bp, Sus scrofa
tcctacccttgaccttcatg

SEQ ID NO: 1641 - DNA, 20 bp, Sus scrofa
ctagggaacacacctcatga

SEQ ID NO: 1642 - DNA, 20 bp, Sus scrofa
agagaaagggagcagtacta

SEQ ID NO: 1643 - DNA, 20 bp, Sus scrofa
cagagaaagggagcagtact

SEQ ID NO: 1644 - DNA, 20 bp, Sus scrofa
ctagtactgctccctttctc

SEQ ID NO: 1645 - DNA, 20 bp, Sus scrofa
aggagagctcaccagagaaa

SEQ ID NO: 1646 - DNA, 20 bp, Sus scrofa
taggagagctcaccagagaa

SEQ ID NO: 1647 - DNA, 20 bp, Sus scrofa
tgaggagttgccaaggctgt

SEQ ID NO: 1648 - DNA, 20 bp, Sus scrofa
ggtgagctctcctacagcct

SEQ ID NO: 1649 - DNA, 20 bp, Sus scrofa
cggaaactgaggagttgcca

SEQ ID NO: 1650 - DNA, 20 bp, Sus scrofa
caaaaggaccccggaaactg

SEQ ID NO: 1651 - DNA, 20 bp, Sus scrofa
cttggcaactcctcagtttc

SEQ ID NO: 1652 - DNA, 20 bp, Sus scrofa
ttggcaactcctcagtttcc

SEQ ID NO: 1653 - DNA, 20 bp, Sus scrofa
tggcaactcctcagtttccg

SEQ ID NO: 1654 - DNA, 20 bp, Sus scrofa
gagggagagcaaaaggaccc

SEQ ID NO: 1655 - DNA, 20 bp, Sus scrofa
gctgcaggagggagagcaaa

SEQ ID NO: 1656 - DNA, 20 bp, Sus scrofa
aatacttcacagctgcagga

SEQ ID NO: 1657 - DNA, 20 bp, Sus scrofa
caatacttcacagctgcagg

SEQ ID NO: 1658 - DNA, 20 bp, Sus scrofa
gtccaatacttcacagctgc

SEQ ID NO: 1659 - DNA, 20 bp, Sus scrofa
ctcctgcagctgtgaagtat

SEQ ID NO: 1660 - DNA, 20 bp, Sus scrofa
cagctgtgaagtattggact

SEQ ID NO: 1661 - DNA, 20 bp, Sus scrofa
agaagaagagtctgtaggga

SEQ ID NO: 1662 - DNA, 20 bp, Sus scrofa
aagaagaagagtctgtaggg

SEQ ID NO: 1663 - DNA, 20 bp, Sus scrofa
aggaagaagaagagtctgta

SEQ ID NO: 1664 - DNA, 20 bp, Sus scrofa
gaggaagaagaagagtctgt

SEQ ID NO: 1665 - DNA, 20 bp, Sus scrofa
agcacctgcagctgtcagtg

SEQ ID NO: 1666 - DNA, 20 bp, Sus scrofa
tcttcctcactgacagctgc

SEQ ID NO: 1667 - DNA, 20 bp, Sus scrofa
tgcaggtgctatgtgctgcc

SEQ ID NO: 1668 - DNA, 20 bp, Sus scrofa
gcaggtgctatgtgctgcct

SEQ ID NO: 1669 - DNA, 20 bp, Sus scrofa
caggtgctatgtgctgcctg

SEQ ID NO: 1670 - DNA, 20 bp, Sus scrofa
aggtgtaaacatcagacccc

SEQ ID NO: 1671 - DNA, 20 bp, Sus scrofa
tagccaagaggtcaggctgg

SEQ ID NO: 1672 - DNA, 20 bp, Sus scrofa
gcttagccaagaggtcaggc

SEQ ID NO: 1673 - DNA, 20 bp, Sus scrofa
ctgggcttagccaagaggtc

SEQ ID NO: 1674 - DNA, 20 bp, Sus scrofa
acacctccagcctgacctct

SEQ ID NO: 1675 - DNA, 20 bp, Sus scrofa
gcatcctgggcttagccaag

SEQ ID NO: 1676 - DNA, 20 bp, Sus scrofa
ctgacctcttggctaagccc

SEQ ID NO: 1677 - DNA, 20 bp, Sus scrofa
ggttgagacaggtgcatcct

SEQ ID NO: 1678 - DNA, 20 bp, Sus scrofa
gggttgagacaggtgcatcc

SEQ ID NO: 1679 - DNA, 20 bp, Sus scrofa
ggggacattagggttgagac

SEQ ID NO: 1680 - DNA, 20 bp, Sus scrofa
tgccgactctggggacatta

SEQ ID NO: 1681 - DNA, 20 bp, Sus scrofa
atgccgactctggggacatt

SEQ ID NO: 1682 - DNA, 20 bp, Sus scrofa
aaccctaatgtccccagagt

SEQ ID NO: 1683 - DNA, 20 bp, Sus scrofa
ctttggacatgccgactctg

SEQ ID NO: 1684 - DNA, 20 bp, Sus scrofa
cctttggacatgccgactct

SEQ ID NO: 1685 - DNA, 20 bp, Sus scrofa
ccctttggacatgccgactc

SEQ ID NO: 1686 - DNA, 20 bp, Sus scrofa
cccagagtcggcatgtccaa

SEQ ID NO: 1687 - DNA, 20 bp, Sus scrofa
ccagagtcggcatgtccaaa

SEQ ID NO: 1688 - DNA, 20 bp, Sus scrofa
gggggctgtgtgcagccctt

SEQ ID NO: 1689 - DNA, 20 bp, Sus scrofa
tctgaagcaaggcttcaagg

SEQ ID NO: 1690 - DNA, 20 bp, Sus scrofa
gtctgaagcaaggcttcaag

SEQ ID NO: 1691 - DNA, 20 bp, Sus scrofa
agtctgaagcaaggcttcaa

SEQ ID NO: 1692 - DNA, 20 bp, Sus scrofa
aagtctgaagcaaggcttca

SEQ ID NO: 1693 - DNA, 20 bp, Sus scrofa
tctggttgaagtctgaagca

SEQ ID NO: 1694 - DNA, 20 bp, Sus scrofa
acattgtggtaagatcattc

SEQ ID NO: 1695 - DNA, 20 bp, Sus scrofa
acacaattacactcacattg

SEQ ID NO: 1696 - DNA, 20 bp, Sus scrofa
ggactttatcctaaggacaa

SEQ ID NO: 1697 - DNA, 20 bp, Sus scrofa
taaaatacaccattgtcctt

SEQ ID NO: 1698 - DNA, 20 bp, Sus scrofa
ggcttctggactttatccta

SEQ ID NO: 1699 - DNA, 20 bp, Sus scrofa
gttgttcttattaaggcttc

SEQ ID NO: 1700 - DNA, 20 bp, Sus scrofa
aatcctagttgttcttatta

SEQ ID NO: 1701 - DNA, 20 bp, Sus scrofa
aagccttaataagaacaact

SEQ ID NO: 1702 - DNA, 20 bp, Sus scrofa
agaacaactaggatttttca

SEQ ID NO: 1703 - DNA, 20 bp, Sus scrofa
aagggggtgaggaaaaaaag

SEQ ID NO: 1704 - DNA, 20 bp, Sus scrofa
agtgcagtgggaagggggtg

SEQ ID NO: 1705 - DNA, 20 bp, Sus scrofa
aggccagtgcagtgggaagg

SEQ ID NO: 1706 - DNA, 20 bp, Sus scrofa
gaggccagtgcagtgggaag

SEQ ID NO: 1707 - DNA, 20 bp, Sus scrofa
tgaggccagtgcagtgggaa

SEQ ID NO: 1708 - DNA, 20 bp, Sus scrofa
gtgaggccagtgcagtggga

SEQ ID NO: 1709 - DNA, 20 bp, Sus scrofa
gtgagtgaggccagtgcagt

SEQ ID NO: 1710 - DNA, 20 bp, Sus scrofa
tcacccccttcccactgcac

SEQ ID NO: 1711 - DNA, 20 bp, Sus scrofa
ggtgagtgaggccagtgcag

SEQ ID NO: 1712 - DNA, 20 bp, Sus scrofa
agcatcaatgctggtgagtg

SEQ ID NO: 1713 - DNA, 20 bp, Sus scrofa
ggattcgagagcatcaatgc

SEQ ID NO: 1714 - DNA, 20 bp, Sus scrofa
gtggcagttcaagcatagaa

SEQ ID NO: 1715 - DNA, 20 bp, Sus scrofa
agatgttaaggacatgatgg

SEQ ID NO: 1716 - DNA, 20 bp, Sus scrofa
attagatgttaaggacatga

SEQ ID NO: 1717 - DNA, 20 bp, Sus scrofa
gtaaagatgattagatgtta

SEQ ID NO: 1718 - DNA, 20 bp, Sus scrofa
ggggtggaggatgaaggaga

SEQ ID NO: 1719 - DNA, 20 bp, Sus scrofa
agaggaggggtggaggatga

SEQ ID NO: 1720 - DNA, 20 bp, Sus scrofa
tagagctagaggaggggtgg

SEQ ID NO: 1721 - DNA, 20 bp, Sus scrofa
acctagagctagaggagggg

SEQ ID NO: 1722 - DNA, 20 bp, Sus scrofa
gagacctagagctagaggag

SEQ ID NO: 1723 - DNA, 20 bp, Sus scrofa
tgagacctagagctagagga

SEQ ID NO: 1724 - DNA, 20 bp, Sus scrofa
atgagacctagagctagagg

SEQ ID NO: 1725 - DNA, 20 bp, Sus scrofa
aaaatgagacctagagctag

SEQ ID NO: 1726 - DNA, 20 bp, Sus scrofa
tccacccctcctctagctct

SEQ ID NO: 1727 - DNA, 20 bp, Sus scrofa
tacaaactgaagctctttga

SEQ ID NO: 1728 - DNA, 20 bp, Sus scrofa
tatttccaacactcacatgc

SEQ ID NO: 1729 - DNA, 20 bp, Sus scrofa
atattcctgcatgtgagtgt

SEQ ID NO: 1730 - DNA, 20 bp, Sus scrofa
tgcagcctatgggctacgtg

SEQ ID NO: 1731 - DNA, 20 bp, Sus scrofa
atgcagcctatgggctacgt

SEQ ID NO: 1732 - DNA, 20 bp, Sus scrofa
catgcagcctatgggctacg

SEQ ID NO: 1733 - DNA, 20 bp, Sus scrofa
gctgtccccacgtagcccat

SEQ ID NO: 1734 - DNA, 20 bp, Sus scrofa
ccctcaatcatgcagcctat

SEQ ID NO: 1735 - DNA, 20 bp, Sus scrofa
cccctcaatcatgcagccta

SEQ ID NO: 1736 - DNA, 20 bp, Sus scrofa
gcccataggctgcatgattg

SEQ ID NO: 1737 - DNA, 20 bp, Sus scrofa
cccataggctgcatgattga

SEQ ID NO: 1738 - DNA, 20 bp, Sus scrofa
ccataggctgcatgattgag

SEQ ID NO: 1739 - DNA, 20 bp, Sus scrofa
cataggctgcatgattgagg

SEQ ID NO: 1740 - DNA, 20 bp, Sus scrofa
catgattgagggggcctatt

SEQ ID NO: 1741 - DNA, 20 bp, Sus scrofa
atgattgagggggcctattt

SEQ ID NO: 1742 - DNA, 20 bp, Sus scrofa
gtgcagtgctgagcccaaat

SEQ ID NO: 1743 - DNA, 20 bp, Sus scrofa
tttgggctcagcactgcact

SEQ ID NO: 1744 - DNA, 20 bp, Sus scrofa
gcactgcacttggcatgtgt

SEQ ID NO: 1745 - DNA, 20 bp, Sus scrofa
cactgcacttggcatgtgtc

SEQ ID NO: 1746 - DNA, 20 bp, Sus scrofa
gtcgggcattgtagaagtat

SEQ ID NO: 1747 - DNA, 20 bp, Sus scrofa
tagaagtattggttgagtga

SEQ ID NO: 1748 - DNA, 20 bp, Sus scrofa
ttggttgagtgaaggagcca

SEQ ID NO: 1749 - DNA, 20 bp, Sus scrofa
acaagaacgtgcaaagacca

SEQ ID NO: 1750 - DNA, 20 bp, Sus scrofa
cttgtcattttcatcaccca

SEQ ID NO: 1751 - DNA, 20 bp, Sus scrofa
cattttcatcacccatggtc

SEQ ID NO: 1752 - DNA, 20 bp, Sus scrofa
tgcctggctcaccagaccat

SEQ ID NO: 1753 - DNA, 20 bp, Sus scrofa
gtgcctggctcaccagacca

SEQ ID NO: 1754 - DNA, 20 bp, Sus scrofa
cacccatggtctggtgagcc

SEQ ID NO: 1755 - DNA, 20 bp, Sus scrofa
tgtttcagtggctttgtgcc

SEQ ID NO: 1756 - DNA, 20 bp, Sus scrofa
cagtggatgctttgtttcag

SEQ ID NO: 1757 - DNA, 20 bp, Sus scrofa
ctgaaacaaagcatccactg

SEQ ID NO: 1758 - DNA, 20 bp, Sus scrofa
ctgaggacaccaaacctcag

SEQ ID NO: 1759 - DNA, 20 bp, Sus scrofa
acaaagcatccactgaggtt

SEQ ID NO: 1760 - DNA, 20 bp, Sus scrofa
accgacccaagggaaagctg

SEQ ID NO: 1761 - DNA, 20 bp, Sus scrofa
tggtgtcctcagctttccct

SEQ ID NO: 1762 - DNA, 20 bp, Sus scrofa
ggtgtcctcagctttccctt

SEQ ID NO: 1763 - DNA, 20 bp, Sus scrofa
tcctcagctttcccttgggt

SEQ ID NO: 1764 - DNA, 20 bp, Sus scrofa
gggagctcacaccgacccaa

SEQ ID NO: 1765 - DNA, 20 bp, Sus scrofa
cgggagctcacaccgaccca

SEQ ID NO: 1766 - DNA, 20 bp, Sus scrofa
gaaagtgtgaatcaggatgc

SEQ ID NO: 1767 - DNA, 20 bp, Sus scrofa
agaaagtgtgaatcaggatg

SEQ ID NO: 1768 - DNA, 20 bp, Sus scrofa
gggctgagaaagtgtgaatc

SEQ ID NO: 1769 - DNA, 20 bp, Sus scrofa
ttcacactttctcagcccag

SEQ ID NO: 1770 - DNA, 20 bp, Sus scrofa
agaaaaatgtgaaaaccact

SEQ ID NO: 1771 - DNA, 20 bp, Sus scrofa
cagaaaaatgtgaaaaccac

SEQ ID NO: 1772 - DNA, 20 bp, Sus scrofa
cagtggttttcacatttttc

SEQ ID NO: 1773 - DNA, 20 bp, Sus scrofa
agtggttttcacatttttct

SEQ ID NO: 1774 - DNA, 20 bp, Sus scrofa
gttcacatttttactgacat

SEQ ID NO: 1775 - DNA, 20 bp, Sus scrofa
ggttcacatttttactgaca

SEQ ID NO: 1776 - DNA, 20 bp, Sus scrofa
acatattagggctggggctc

SEQ ID NO: 1777 - DNA, 20 bp, Sus scrofa
aggtagacatattagggctg

SEQ ID NO: 1778 - DNA, 20 bp, Sus scrofa
aaggtagacatattagggct

SEQ ID NO: 1779 - DNA, 20 bp, Sus scrofa
aaaggtagacatattagggc

SEQ ID NO: 1780 - DNA, 20 bp, Sus scrofa
actaaaaggtagacatatta

SEQ ID NO: 1781 - DNA, 20 bp, Sus scrofa
aactaaaaggtagacatatt

SEQ ID NO: 1782 - DNA, 20 bp, Sus scrofa
gtgagtcacctgtaactaaa

SEQ ID NO: 1783 - DNA, 20 bp, Sus scrofa
tatgtctaccttttagttac

SEQ ID NO: 1784 - DNA, 20 bp, Sus scrofa
cccagacaatagactggtgc

SEQ ID NO: 1785 - DNA, 20 bp, Sus scrofa
atggcccccagacaatagac

SEQ ID NO: 1786 - DNA, 20 bp, Sus scrofa
tcctgcaccagtctattgtc

SEQ ID NO: 1787 - DNA, 20 bp, Sus scrofa
cctgcaccagtctattgtct

SEQ ID NO: 1788 - DNA, 20 bp, Sus scrofa
ctgcaccagtctattgtctg

SEQ ID NO: 1789 - DNA, 20 bp, Sus scrofa
tgcaccagtctattgtctgg

SEQ ID NO: 1790 - DNA, 20 bp, Sus scrofa
ttgtctgggggccatccact

SEQ ID NO: 1791 - DNA, 20 bp, Sus scrofa
agtgtggtctcccaagtgga

SEQ ID NO: 1792 - DNA, 20 bp, Sus scrofa
tgtctgggggccatccactt

SEQ ID NO: 1793 - DNA, 20 bp, Sus scrofa
gaggagtgtggtctcccaag

SEQ ID NO: 1794 - DNA, 20 bp, Sus scrofa
ggcaattgactggaggagtg

SEQ ID NO: 1795 - DNA, 20 bp, Sus scrofa
taacacaggcaattgactgg

SEQ ID NO: 1796 - DNA, 20 bp, Sus scrofa
aaataacacaggcaattgac

SEQ ID NO: 1797 - DNA, 20 bp, Sus scrofa
aaccaaattaaaaataacac

SEQ ID NO: 1798 - DNA, 20 bp, Sus scrofa
tgcctgtgttatttttaatt

SEQ ID NO: 1799 - DNA, 20 bp, Sus scrofa
aggcccaggcatttcttaca

SEQ ID NO: 1800 - DNA, 20 bp, Sus scrofa
catgccatgtaagaaatgcc

SEQ ID NO: 1801 - DNA, 20 bp, Sus scrofa
atgccatgtaagaaatgcct

SEQ ID NO: 1802 - DNA, 20 bp, Sus scrofa
aggagagcttgataaggccc

SEQ ID NO: 1803 - DNA, 20 bp, Sus scrofa
taaggaaggagagcttgata

SEQ ID NO: 1804 - DNA, 20 bp, Sus scrofa
tgggaagatcttaataagga

SEQ ID NO: 1805 - DNA, 20 bp, Sus scrofa
gggttgggaagatcttaata

SEQ ID NO: 1806 - DNA, 20 bp, Sus scrofa
tattaagatcttcccaaccc

SEQ ID NO: 1807 - DNA, 20 bp, Sus scrofa
tacccatcaacaccagggtt

SEQ ID NO: 1808 - DNA, 20 bp, Sus scrofa
ctacccatcaacaccagggt

SEQ ID NO: 1809 - DNA, 20 bp, Sus scrofa
actcctacccatcaacacca

SEQ ID NO: 1810 - DNA, 20 bp, Sus scrofa
cactcctacccatcaacacc

SEQ ID NO: 1811 - DNA, 20 bp, Sus scrofa
cttcccaaccctggtgttga

SEQ ID NO: 1812 - DNA, 20 bp, Sus scrofa
ttcccaaccctggtgttgat

SEQ ID NO: 1813 - DNA, 20 bp, Sus scrofa
caaccctggtgttgatgggt

SEQ ID NO: 1814 - DNA, 20 bp, Sus scrofa
ctggtgttgatgggtaggag

SEQ ID NO: 1815 - DNA, 20 bp, Sus scrofa
ctgcttatcaaagaagggtg

SEQ ID NO: 1816 - DNA, 20 bp, Sus scrofa
tttccctgcttatcaaagaa

SEQ ID NO: 1817 - DNA, 20 bp, Sus scrofa
ttttccctgcttatcaaaga

SEQ ID NO: 1818 - DNA, 20 bp, Sus scrofa
ctcacccttctttgataagc

SEQ ID NO: 1819 - DNA, 20 bp, Sus scrofa
tcacccttctttgataagca

SEQ ID NO: 1820 - DNA, 20 bp, Sus scrofa
tttgataagcagggaaaatc

SEQ ID NO: 1821 - DNA, 20 bp, Sus scrofa
ttgataagcagggaaaatcc

SEQ ID NO: 1822 - DNA, 20 bp, Sus scrofa
ctgggagtctcgggcagacc

SEQ ID NO: 1823 - DNA, 20 bp, Sus scrofa
cttgatttgctgggagtctc

SEQ ID NO: 1824 - DNA, 20 bp, Sus scrofa
acttgatttgctgggagtct

SEQ ID NO: 1825 - DNA, 20 bp, Sus scrofa
cagcggacacttgatttgct

SEQ ID NO: 1826 - DNA, 20 bp, Sus scrofa
gcagcggacacttgatttgc

SEQ ID NO: 1827 - DNA, 20 bp, Sus scrofa
acccagctgacaggcagcag

SEQ ID NO: 1828 - DNA, 20 bp, Sus scrofa
gtccgctgctgcctgtcagc

SEQ ID NO: 1829 - DNA, 20 bp, Sus scrofa
ccaggcagcacccagctgac

SEQ ID NO: 1830 - DNA, 20 bp, Sus scrofa
tccgctgctgcctgtcagct

SEQ ID NO: 1831 - DNA, 20 bp, Sus scrofa
cctgtcagctgggtgctgcc

SEQ ID NO: 1832 - DNA, 20 bp, Sus scrofa
cagctgggtgctgcctggtc

SEQ ID NO: 1833 - DNA, 20 bp, Sus scrofa
tctgtgcacacagcctgacc

SEQ ID NO: 1834 - DNA, 20 bp, Sus scrofa
gagacgacctgagggagctt

SEQ ID NO: 1835 - DNA, 20 bp, Sus scrofa
agagacgacctgagggagct

SEQ ID NO: 1836 - DNA, 20 bp, Sus scrofa
agacacacccaagctccctc

SEQ ID NO: 1837 - DNA, 20 bp, Sus scrofa
gatcttaagagacgacctga

SEQ ID NO: 1838 - DNA, 20 bp, Sus scrofa
ggatcttaagagacgacctg

SEQ ID NO: 1839 - DNA, 20 bp, Sus scrofa
tcgtctcttaagatccagta

SEQ ID NO: 1840 - DNA, 20 bp, Sus scrofa
agcccaggggctagccttac

SEQ ID NO: 1841 - DNA, 20 bp, Sus scrofa
gatccagtaaggctagcccc

SEQ ID NO: 1842 - DNA, 20 bp, Sus scrofa
atccagtaaggctagcccct

SEQ ID NO: 1843 - DNA, 20 bp, Sus scrofa
catctgcaggagtagcccag

SEQ ID NO: 1844 - DNA, 20 bp, Sus scrofa
gcatctgcaggagtagccca

SEQ ID NO: 1845 - DNA, 20 bp, Sus scrofa
agcatctgcaggagtagccc

SEQ ID NO: 1846 - DNA, 20 bp, Sus scrofa
gggcctttccaagcatctgc

SEQ ID NO: 1847 - DNA, 20 bp, Sus scrofa
gggctactcctgcagatgct

SEQ ID NO: 1848 - DNA, 20 bp, Sus scrofa
actcctgcagatgcttggaa

SEQ ID NO: 1849 - DNA, 20 bp, Sus scrofa
cctctcacctgattacttct

SEQ ID NO: 1850 - DNA, 20 bp, Sus scrofa
tcctctcacctgattacttc

SEQ ID NO: 1851 - DNA, 20 bp, Sus scrofa
ggaaaggcccagaagtaatc

SEQ ID NO: 1852 - DNA, 20 bp, Sus scrofa
cccagaagtaatcaggtgag

SEQ ID NO: 1853 - DNA, 20 bp, Sus scrofa
aatcaggtgagaggatccca

SEQ ID NO: 1854 - DNA, 20 bp, Sus scrofa
atcaggtgagaggatcccat

SEQ ID NO: 1855 - DNA, 20 bp, Sus scrofa
cgcccaagtccgcggcccat

SEQ ID NO: 1856 - DNA, 20 bp, Sus scrofa
tcgcccaagtccgcggccca

SEQ ID NO: 1857 - DNA, 20 bp, Sus scrofa
tgagaggatcccatgggccg

SEQ ID NO: 1858 - DNA, 20 bp, Sus scrofa
gatcccatgggccgcggact

SEQ ID NO: 1859 - DNA, 20 bp, Sus scrofa
ccctgactcgcccaagtccg

SEQ ID NO: 1860 - DNA, 20 bp, Sus scrofa
atcccatgggccgcggactt

SEQ ID NO: 1861 - DNA, 20 bp, Sus scrofa
gccgcggacttgggcgagtc

SEQ ID NO: 1862 - DNA, 20 bp, Sus scrofa
ccgcggacttgggcgagtca

SEQ ID NO: 1863 - DNA, 20 bp, Sus scrofa
ggacttgggcgagtcaggga

SEQ ID NO: 1864 - DNA, 20 bp, Sus scrofa
gacttgggcgagtcagggaa

SEQ ID NO: 1865 - DNA, 20 bp, Sus scrofa
acttgggcgagtcagggaag

SEQ ID NO: 1866 - DNA, 20 bp, Sus scrofa
cttgggcgagtcagggaagg

SEQ ID NO: 1867 - DNA, 20 bp, Sus scrofa
gggcgagtcagggaaggggg

SEQ ID NO: 1868 - DNA, 20 bp, Sus scrofa
cgagtcagggaagggggagg

SEQ ID NO: 1869 - DNA, 20 bp, Sus scrofa
tttccagcctgcaggataat

SEQ ID NO: 1870 - DNA, 20 bp, Sus scrofa
gtgctctcctattatcctgc

SEQ ID NO: 1871 - DNA, 20 bp, Sus scrofa
tctcctattatcctgcaggc

SEQ ID NO: 1872 - DNA, 20 bp, Sus scrofa
ctgacagatttccagcctgc

SEQ ID NO: 1873 - DNA, 20 bp, Sus scrofa
gcaggctggaaatctgtcag

SEQ ID NO: 1874 - DNA, 20 bp, Sus scrofa
gctggaaatctgtcagaggc

SEQ ID NO: 1875 - DNA, 20 bp, Sus scrofa
gtcagaggcaggatctgtgc

SEQ ID NO: 1876 - DNA, 20 bp, Sus scrofa
caggatctgtgcaggctaga

SEQ ID NO: 1877 - DNA, 20 bp, Sus scrofa
aggatctgtgcaggctagaa

SEQ ID NO: 1878 - DNA, 20 bp, Sus scrofa
tctgtgcaggctagaagggc

SEQ ID NO: 1879 - DNA, 20 bp, Sus scrofa
gggcaggagttgatcaccac

SEQ ID NO: 1880 - DNA, 20 bp, Sus scrofa
ggcaggagttgatcaccaca

SEQ ID NO: 1881 - DNA, 20 bp, Sus scrofa
gtcttctccaggtttccctg

SEQ ID NO: 1882 - DNA, 20 bp, Sus scrofa
ttgatcaccacagggaaacc

SEQ ID NO: 1883 - DNA, 20 bp, Sus scrofa
ccggcgggcctgtcttctcc

SEQ ID NO: 1884 - DNA, 20 bp, Sus scrofa
cagggaaacctggagaagac

SEQ ID NO: 1885 - DNA, 20 bp, Sus scrofa
cctggagaagacaggcccgc

SEQ ID NO: 1886 - DNA, 20 bp, Sus scrofa
gcccccatagaaacaccggc

SEQ ID NO: 1887 - DNA, 20 bp, Sus scrofa
tgcccccatagaaacaccgg

SEQ ID NO: 1888 - DNA, 20 bp, Sus scrofa
aagtgcccccatagaaacac

SEQ ID NO: 1889 - DNA, 20 bp, Sus scrofa
caggcccgccggtgtttcta

SEQ ID NO: 1890 - DNA, 20 bp, Sus scrofa
aggcccgccggtgtttctat

SEQ ID NO: 1891 - DNA, 20 bp, Sus scrofa
ggcccgccggtgtttctatg

SEQ ID NO: 1892 - DNA, 20 bp, Sus scrofa
gcccgccggtgtttctatgg

SEQ ID NO: 1893 - DNA, 20 bp, Sus scrofa
tgagtctctacagtcagaag

SEQ ID NO: 1894 - DNA, 20 bp, Sus scrofa
atccaccgatccagagcttc

SEQ ID NO: 1895 - DNA, 20 bp, Sus scrofa
tcagaagtggccagaagctc

SEQ ID NO: 1896 - DNA, 20 bp, Sus scrofa
agtggccagaagctctggat

SEQ ID NO: 1897 - DNA, 20 bp, Sus scrofa
ggccagaagctctggatcgg

SEQ ID NO: 1898 - DNA, 20 bp, Sus scrofa
tcactcatgcccttggcaaa

SEQ ID NO: 1899 - DNA, 20 bp, Sus scrofa
gattctgctaccttttgcca

SEQ ID NO: 1900 - DNA, 20 bp, Sus scrofa
attctgctaccttttgccaa

SEQ ID NO: 1901 - DNA, 20 bp, Sus scrofa
cactctctcactcatgccct

SEQ ID NO: 1902 - DNA, 20 bp, Sus scrofa
gagtgagagagtgagtgagc

SEQ ID NO: 1903 - DNA, 20 bp, Sus scrofa
agtgagagagtgagtgagct

SEQ ID NO: 1904 - DNA, 20 bp, Sus scrofa
gagagtgagtgagctgggag

SEQ ID NO: 1905 - DNA, 20 bp, Sus scrofa
gtgagctgggagtggattgc

SEQ ID NO: 1906 - DNA, 20 bp, Sus scrofa
tgagctgggagtggattgct

SEQ ID NO: 1907 - DNA, 20 bp, Sus scrofa
gagctgggagtggattgctg

SEQ ID NO: 1908 - DNA, 20 bp, Sus scrofa
agctgggagtggattgctgg

SEQ ID NO: 1909 - DNA, 20 bp, Sus scrofa
gcaatagctcaggggaaagt

SEQ ID NO: 1910 - DNA, 20 bp, Sus scrofa
ttggtgaggcaatagctcag

SEQ ID NO: 1911 - DNA, 20 bp, Sus scrofa
gttggtgaggcaatagctca

SEQ ID NO: 1912 - DNA, 20 bp, Sus scrofa
tgttggtgaggcaatagctc

SEQ ID NO: 1913 - DNA, 20 bp, Sus scrofa
cagcacccggcctgttggtg

SEQ ID NO: 1914 - DNA, 20 bp, Sus scrofa
tgagctattgcctcaccaac

SEQ ID NO: 1915 - DNA, 20 bp, Sus scrofa
ctattgcctcaccaacaggc

SEQ ID NO: 1916 - DNA, 20 bp, Sus scrofa
agccccagcacccggcctgt

SEQ ID NO: 1917 - DNA, 20 bp, Sus scrofa
tattgcctcaccaacaggcc

SEQ ID NO: 1918 - DNA, 20 bp, Sus scrofa
ctcaccaacaggccgggtgc

SEQ ID NO: 1919 - DNA, 20 bp, Sus scrofa
tcaccaacaggccgggtgct

SEQ ID NO: 1920 - DNA, 20 bp, Sus scrofa
cccaccacagccccagcacc

SEQ ID NO: 1921 - DNA, 20 bp, Sus scrofa
caccaacaggccgggtgctg

SEQ ID NO: 1922 - DNA, 20 bp, Sus scrofa
caggccgggtgctggggctg

SEQ ID NO: 1923 - DNA, 20 bp, Sus scrofa
gccgggtgctggggctgtgg

SEQ ID NO: 1924 - DNA, 20 bp, Sus scrofa
ccgggtgctggggctgtggt

SEQ ID NO: 1925 - DNA, 20 bp, Sus scrofa
ggtgctggggctgtggtggg

SEQ ID NO: 1926 - DNA, 20 bp, Sus scrofa
gtgctggggctgtggtggga

SEQ ID NO: 1927 - DNA, 20 bp, Sus scrofa
ggggctgtggtgggagggtg

SEQ ID NO: 1928 - DNA, 20 bp, Sus scrofa
gggctgtggtgggagggtga

SEQ ID NO: 1929 - DNA, 20 bp, Sus scrofa
ggctgtggtgggagggtgag

SEQ ID NO: 1930 - DNA, 20 bp, Sus scrofa
ttgtgctcacaggtgaaagt

SEQ ID NO: 1931 - DNA, 20 bp, Sus scrofa
gttgtgctcacaggtgaaag

SEQ ID NO: 1932 - DNA, 20 bp, Sus scrofa
attcctaatgttgtgctcac

SEQ ID NO: 1933 - DNA, 20 bp, Sus scrofa
tcacctgtgagcacaacatt

SEQ ID NO: 1934 - DNA, 20 bp, Sus scrofa
tctgtaagtatccgtgtagc

SEQ ID NO: 1935 - DNA, 20 bp, Sus scrofa
aataaattctacctgctaca

SEQ ID NO: 1936 - DNA, 20 bp, Sus scrofa
gaatctcattatctgtgctc

SEQ ID NO: 1937 - DNA, 20 bp, Sus scrofa
aatctcattatctgtgctct

SEQ ID NO: 1938 - DNA, 20 bp, Sus scrofa
tcattatctgtgctctgggc

SEQ ID NO: 1939 - DNA, 20 bp, Sus scrofa
cattatctgtgctctgggct

SEQ ID NO: 1940 - DNA, 20 bp, Sus scrofa
attatctgtgctctgggctg

SEQ ID NO: 1941 - DNA, 20 bp, Sus scrofa
ttatctgtgctctgggctgg

SEQ ID NO: 1942 - DNA, 20 bp, Sus scrofa
tctgtgctctgggctggggg

SEQ ID NO: 1943 - DNA, 20 bp, Sus scrofa
gtgctctgggctgggggagg

SEQ ID NO: 1944 - DNA, 20 bp, Sus scrofa
tgggggaggtggtacgcata

SEQ ID NO: 1945 - DNA, 20 bp, Sus scrofa
gggggaggtggtacgcatat

SEQ ID NO: 1946 - DNA, 20 bp, Sus scrofa
ggggaggtggtacgcatatg

SEQ ID NO: 1947 - DNA, 20 bp, Sus scrofa
gggaggtggtacgcatatgg

SEQ ID NO: 1948 - DNA, 20 bp, Sus scrofa
ggaggtggtacgcatatggg

SEQ ID NO: 1949 - DNA, 20 bp, Sus scrofa
tggtacgcatatggggggag

SEQ ID NO: 1950 - DNA, 20 bp, Sus scrofa
ggtacgcatatggggggagt

SEQ ID NO: 1951 - DNA, 20 bp, Sus scrofa
gggagtgggttacagaaagc

SEQ ID NO: 1952 - DNA, 20 bp, Sus scrofa
cccaactctgctacagaaac

SEQ ID NO: 1953 - DNA, 20 bp, Sus scrofa
tccagtttctgtagcagagt

SEQ ID NO: 1954 - DNA, 20 bp, Sus scrofa
ccagtttctgtagcagagtt

SEQ ID NO: 1955 - DNA, 20 bp, Sus scrofa
cagtttctgtagcagagttg

SEQ ID NO: 1956 - DNA, 20 bp, Sus scrofa
tttctgtagcagagttgggg

SEQ ID NO: 1957 - DNA, 20 bp, Sus scrofa
ttggggaggtatagctaaca

SEQ ID NO: 1958 - DNA, 20 bp, Sus scrofa
gtatagctaacacggcactt

SEQ ID NO: 1959 - DNA, 20 bp, Sus scrofa
agctaacacggcacttaggc

SEQ ID NO: 1960 - DNA, 20 bp, Sus scrofa
taacacggcacttaggcagg

SEQ ID NO: 1961 - DNA, 20 bp, Sus scrofa
cggcacttaggcaggaggaa

SEQ ID NO: 1962 - DNA, 20 bp, Sus scrofa
taggcaggaggaaaggtgtg

SEQ ID NO: 1963 - DNA, 20 bp, Sus scrofa
caggaggaaaggtgtgtggt

SEQ ID NO: 1964 - DNA, 20 bp, Sus scrofa
ggaaaggtgtgtggttggta

SEQ ID NO: 1965 - DNA, 20 bp, Sus scrofa
tgggttctgatgcacagctg

SEQ ID NO: 1966 - DNA, 20 bp, Sus scrofa
gtgggttctgatgcacagct

SEQ ID NO: 1967 - DNA, 20 bp, Sus scrofa
ggtgggttctgatgcacagc

SEQ ID NO: 1968 - DNA, 20 bp, Sus scrofa
gctgtgcatcagaacccacc

SEQ ID NO: 1969 - DNA, 20 bp, Sus scrofa
ctgtgcatcagaacccacca

SEQ ID NO: 1970 - DNA, 20 bp, Sus scrofa
tgtgcatcagaacccaccag

SEQ ID NO: 1971 - DNA, 20 bp, Sus scrofa
tcttaaaatgctcccctggt

SEQ ID NO: 1972 - DNA, 20 bp, Sus scrofa
ttcttaaaatgctcccctgg

SEQ ID NO: 1973 - DNA, 20 bp, Sus scrofa
aatttcttaaaatgctcccc

SEQ ID NO: 1974 - DNA, 20 bp, Sus scrofa
gagcattttaagaaattccc

SEQ ID NO: 1975 - DNA, 20 bp, Sus scrofa
ttggtggttgggtagagcct

SEQ ID NO: 1976 - DNA, 20 bp, Sus scrofa
cttggtggttgggtagagcc

SEQ ID NO: 1977 - DNA, 20 bp, Sus scrofa
gggagactgacttggtggtt

SEQ ID NO: 1978 - DNA, 20 bp, Sus scrofa
tgggagactgacttggtggt

SEQ ID NO: 1979 - DNA, 20 bp, Sus scrofa
accttgggagactgacttgg

SEQ ID NO: 1980 - DNA, 20 bp, Sus scrofa
accaccttgggagactgact

SEQ ID NO: 1981 - DNA, 20 bp, Sus scrofa
accaccaagtcagtctccca

SEQ ID NO: 1982 - DNA, 20 bp, Sus scrofa
accaagtcagtctcccaagg

SEQ ID NO: 1983 - DNA, 20 bp, Sus scrofa
aagagactgggcaccacctt

SEQ ID NO: 1984 - DNA, 20 bp, Sus scrofa
aaagagactgggcaccacct

SEQ ID NO: 1985 - DNA, 20 bp, Sus scrofa
gagcattctaaaaagagact

SEQ ID NO: 1986 - DNA, 20 bp, Sus scrofa
agagcattctaaaaagagac

SEQ ID NO: 1987 - DNA, 20 bp, Sus scrofa
ctaaagtgagctctaaagca

SEQ ID NO: 1988 - DNA, 20 bp, Sus scrofa
agtgagctctaaagcatggc

SEQ ID NO: 1989 - DNA, 20 bp, Sus scrofa
gtgagctctaaagcatggct

SEQ ID NO: 1990 - DNA, 20 bp, Sus scrofa
tgcaccctgactcaatgtgg

SEQ ID NO: 1991 - DNA, 20 bp, Sus scrofa
ttctgcaccctgactcaatg

SEQ ID NO: 1992 - DNA, 20 bp, Sus scrofa
gggtgccgccacattgagtc

SEQ ID NO: 1993 - DNA, 20 bp, Sus scrofa
ggtgccgccacattgagtca

SEQ ID NO: 1994 - DNA, 20 bp, Sus scrofa
agggtgcagaacttcacagc

SEQ ID NO: 1995 - DNA, 20 bp, Sus scrofa
tgcagaacttcacagcaggt

SEQ ID NO: 1996 - DNA, 20 bp, Sus scrofa
gtaggaagaagtaaaccaaa

SEQ ID NO: 1997 - DNA, 20 bp, Sus scrofa
tcctctctcttacatccatt

SEQ ID NO: 1998 - DNA, 20 bp, Sus scrofa
accaaatggatgtaagagag

SEQ ID NO: 1999 - DNA, 20 bp, Sus scrofa
ggatgtaagagagaggaaaa

SEQ ID NO: 2000 - DNA, 20 bp, Sus scrofa
agagagaggaaaatggagca

SEQ ID NO: 2001 - DNA, 20 bp, Sus scrofa
gagcaaggaaaacagcaaag

SEQ ID NO: 2002 - DNA, 20 bp, Sus scrofa
aaaacagcaaagaggaaagc

SEQ ID NO: 2003 - DNA, 20 bp, Sus scrofa
gcaaagaggaaagcaggtgc

SEQ ID NO: 2004 - DNA, 20 bp, Sus scrofa
aggtgcaggatttaacctgc

SEQ ID NO: 2005 - DNA, 20 bp, Sus scrofa
ggtgcaggatttaacctgct

SEQ ID NO: 2006 - DNA, 20 bp, Sus scrofa
gtgcaggatttaacctgctg

SEQ ID NO: 2007 - DNA, 20 bp, Sus scrofa
ccgggtcccagcaccccagc

SEQ ID NO: 2008 - DNA, 20 bp, Sus scrofa
gatttaacctgctggggtgc

SEQ ID NO: 2009 - DNA, 20 bp, Sus scrofa
atttaacctgctggggtgct

SEQ ID NO: 2010 - DNA, 20 bp, Sus scrofa
cctgctggggtgctgggacc

SEQ ID NO: 2011 - DNA, 20 bp, Sus scrofa
ggatgggcaggctaagaacc

SEQ ID NO: 2012 - DNA, 20 bp, Sus scrofa
gggatgggcaggctaagaac

SEQ ID NO: 2013 - DNA, 20 bp, Sus scrofa
agggcagggcagggatgggc

SEQ ID NO: 2014 - DNA, 20 bp, Sus scrofa
ggccagggcagggcagggat

SEQ ID NO: 2015 - DNA, 20 bp, Sus scrofa
tggccagggcagggcaggga

SEQ ID NO: 2016 - DNA, 20 bp, Sus scrofa
tgtgtggccagggcagggca

SEQ ID NO: 2017 - DNA, 20 bp, Sus scrofa
ctgtgtggccagggcagggc

SEQ ID NO: 2018 - DNA, 20 bp, Sus scrofa
tgcccatccctgccctgccc

SEQ ID NO: 2019 - DNA, 20 bp, Sus scrofa
aaatctgtgtggccagggca

SEQ ID NO: 2020 - DNA, 20 bp, Sus scrofa
gaaatctgtgtggccagggc

SEQ ID NO: 2021 - DNA, 20 bp, Sus scrofa
atgtgaaatctgtgtggcca

SEQ ID NO: 2022 - DNA, 20 bp, Sus scrofa
catgtgaaatctgtgtggcc

SEQ ID NO: 2023 - DNA, 20 bp, Sus scrofa
gggcacatgtgaaatctgtg

SEQ ID NO: 2024 - DNA, 20 bp, Sus scrofa
aatgtgatgagcaggaatgc

SEQ ID NO: 2025 - DNA, 20 bp, Sus scrofa
aaatgtgatgagcaggaatg

SEQ ID NO: 2026 - DNA, 20 bp, Sus scrofa
aaatcacaaatgtgatgagc

SEQ ID NO: 2027 - DNA, 20 bp, Sus scrofa
atttgtgattttttgtttac

SEQ ID NO: 2028 - DNA, 20 bp, Sus scrofa
ggtatctcatgagtgctaag

SEQ ID NO: 2029 - DNA, 20 bp, Sus scrofa
gtatctcatgagtgctaagc

SEQ ID NO: 2030 - DNA, 20 bp, Sus scrofa
taagcgggatttattgagta

SEQ ID NO: 2031 - DNA, 20 bp, Sus scrofa
cgggatttattgagtaaggc

SEQ ID NO: 2032 - DNA, 20 bp, Sus scrofa
ggctggatttgatccatcct

SEQ ID NO: 2033 - DNA, 20 bp, Sus scrofa
agttccctgaagaccaagga

SEQ ID NO: 2034 - DNA, 20 bp, Sus scrofa
tctcagttccctgaagacca

SEQ ID NO: 2035 - DNA, 20 bp, Sus scrofa
ttgatccatccttggtcttc

SEQ ID NO: 2036 - DNA, 20 bp, Sus scrofa
tgatccatccttggtcttca

SEQ ID NO: 2037 - DNA, 20 bp, Sus scrofa
ttggtcttcagggaactgag

SEQ ID NO: 2038 - DNA, 20 bp, Sus scrofa
tcagggaactgagaggctag

SEQ ID NO: 2039 - DNA, 20 bp, Sus scrofa
ctagtggatattttgtaaaa

SEQ ID NO: 2040 - DNA, 20 bp, Sus scrofa
gtggatattttgtaaaaagg

SEQ ID NO: 2041 - DNA, 20 bp, Sus scrofa
tggatattttgtaaaaagga

SEQ ID NO: 2042 - DNA, 20 bp, Sus scrofa
tgtaaaaaggagggaaccta

SEQ ID NO: 2043 - DNA, 20 bp, Sus scrofa
gtaaaaaggagggaacctaa

SEQ ID NO: 2044 - DNA, 20 bp, Sus scrofa
cccctgactgcatggccctt

SEQ ID NO: 2045 - DNA, 20 bp, Sus scrofa
gcccaatacccctgactgca

SEQ ID NO: 2046 - DNA, 20 bp, Sus scrofa
aacctaagggccatgcagtc

SEQ ID NO: 2047 - DNA, 20 bp, Sus scrofa
acctaagggccatgcagtca

SEQ ID NO: 2048 - DNA, 20 bp, Sus scrofa
cctaagggccatgcagtcag

SEQ ID NO: 2049 - DNA, 20 bp, Sus scrofa
ggccatgcagtcaggggtat

SEQ ID NO: 2050 - DNA, 20 bp, Sus scrofa
gccatgcagtcaggggtatt

SEQ ID NO: 2051 - DNA, 20 bp, Sus scrofa
caggggtattgggctgtgcc

SEQ ID NO: 2052 - DNA, 20 bp, Sus scrofa
tgatggggctcagggggtcc

SEQ ID NO: 2053 - DNA, 20 bp, Sus scrofa
ctcaagtgatggggctcagg

SEQ ID NO: 2054 - DNA, 20 bp, Sus scrofa
cctcaagtgatggggctcag

SEQ ID NO: 2055 - DNA, 20 bp, Sus scrofa
tcctcaagtgatggggctca

SEQ ID NO: 2056 - DNA, 20 bp, Sus scrofa
atcctcaagtgatggggctc

SEQ ID NO: 2057 - DNA, 20 bp, Sus scrofa
ccagatatcctcaagtgatg

SEQ ID NO: 2058 - DNA, 20 bp, Sus scrofa
gccagatatcctcaagtgat

SEQ ID NO: 2059 - DNA, 20 bp, Sus scrofa
tgccagatatcctcaagtga

SEQ ID NO: 2060 - DNA, 20 bp, Sus scrofa
cccctgagccccatcacttg

SEQ ID NO: 2061 - DNA, 20 bp, Sus scrofa
ccccatcacttgaggatatc

SEQ ID NO: 2062 - DNA, 20 bp, Sus scrofa
atcacttgaggatatctggc

SEQ ID NO: 2063 - DNA, 20 bp, Sus scrofa
caggcagctgaggttcaaaa

SEQ ID NO: 2064 - DNA, 20 bp, Sus scrofa
ctttacaggtcaggcagctg

SEQ ID NO: 2065 - DNA, 20 bp, Sus scrofa
tagtcaccactttacaggtc

SEQ ID NO: 2066 - DNA, 20 bp, Sus scrofa
cagctgcctgacctgtaaag

SEQ ID NO: 2067 - DNA, 20 bp, Sus scrofa
agtgttagtcaccactttac

SEQ ID NO: 2068 - DNA, 20 bp, Sus scrofa
gacaacagcccctgggaaac

SEQ ID NO: 2069 - DNA, 20 bp, Sus scrofa
aacactaatacctgtttccc

SEQ ID NO: 2070 - DNA, 20 bp, Sus scrofa
acactaatacctgtttccca

SEQ ID NO: 2071 - DNA, 20 bp, Sus scrofa
cactaatacctgtttcccag

SEQ ID NO: 2072 - DNA, 20 bp, Sus scrofa
ccatcctgacaacagcccct

SEQ ID NO: 2073 - DNA, 20 bp, Sus scrofa
tccatcctgacaacagcccc

SEQ ID NO: 2074 - DNA, 20 bp, Sus scrofa
gtttcccaggggctgttgtc

SEQ ID NO: 2075 - DNA, 20 bp, Sus scrofa
cccaggggctgttgtcagga

SEQ ID NO: 2076 - DNA, 20 bp, Sus scrofa
tgtcaggatggagagaaata

SEQ ID NO: 2077 - DNA, 20 bp, Sus scrofa
agagaaataaggtttatccc

SEQ ID NO: 2078 - DNA, 20 bp, Sus scrofa
aataaggtttatcccaggta

SEQ ID NO: 2079 - DNA, 20 bp, Sus scrofa
gctgtccacagtccatacct

SEQ ID NO: 2080 - DNA, 20 bp, Sus scrofa
ggctgtccacagtccatacc

SEQ ID NO: 2081 - DNA, 20 bp, Sus scrofa
tttatcccaggtatggactg

SEQ ID NO: 2082 - DNA, 20 bp, Sus scrofa
cagaatctactaagcttcag

SEQ ID NO: 2083 - DNA, 20 bp, Sus scrofa
tcagaatctactaagcttca

SEQ ID NO: 2084 - DNA, 20 bp, Sus scrofa
gtcagaatctactaagcttc

SEQ ID NO: 2085 - DNA, 20 bp, Sus scrofa
tagtagattctgaccagcct

SEQ ID NO: 2086 - DNA, 20 bp, Sus scrofa
cagctcaatcaagcctaggc

SEQ ID NO: 2087 - DNA, 20 bp, Sus scrofa
ccaacagctcaatcaagcct

SEQ ID NO: 2088 - DNA, 20 bp, Sus scrofa
cctaggcttgattgagctgt

SEQ ID NO: 2089 - DNA, 20 bp, Sus scrofa
gcttgattgagctgttggaa

SEQ ID NO: 2090 - DNA, 20 bp, Sus scrofa
tggtgtagacagccctactg

SEQ ID NO: 2091 - DNA, 20 bp, Sus scrofa
agcaagggccttcctcagta

SEQ ID NO: 2092 - DNA, 20 bp, Sus scrofa
gagcaagggccttcctcagt

SEQ ID NO: 2093 - DNA, 20 bp, Sus scrofa
gtagacagccctactgagga

SEQ ID NO: 2094 - DNA, 20 bp, Sus scrofa
caagctcagatagtgagcaa

SEQ ID NO: 2095 - DNA, 20 bp, Sus scrofa
acaagctcagatagtgagca

SEQ ID NO: 2096 - DNA, 20 bp, Sus scrofa
tcactatctgagcttgtgtg

SEQ ID NO: 2097 - DNA, 20 bp, Sus scrofa
ctatctgagcttgtgtgtgg

SEQ ID NO: 2098 - DNA, 20 bp, Sus scrofa
tatctgagcttgtgtgtggc

SEQ ID NO: 2099 - DNA, 20 bp, Sus scrofa
tgtgtgtggcgggagtactt

SEQ ID NO: 2100 - DNA, 20 bp, Sus scrofa
gtgtggcgggagtacttagg

SEQ ID NO: 2101 - DNA, 20 bp, Sus scrofa
tgtggcgggagtacttagga

SEQ ID NO: 2102 - DNA, 20 bp, Sus scrofa
agtacttaggagggctcact

SEQ ID NO: 2103 - DNA, 20 bp, Sus scrofa
gggctcacttggagctgctc

SEQ ID NO: 2104 - DNA, 20 bp, Sus scrofa
ctcacttggagctgctcagg

SEQ ID NO: 2105 - DNA, 20 bp, Sus scrofa
tcacttggagctgctcaggt

SEQ ID NO: 2106 - DNA, 20 bp, Sus scrofa
cttggagctgctcaggtggg

SEQ ID NO: 2107 - DNA, 20 bp, Sus scrofa
ttggagctgctcaggtgggt

SEQ ID NO: 2108 - DNA, 20 bp, Sus scrofa
gctgctcaggtgggtgggcg

SEQ ID NO: 2109 - DNA, 20 bp, Sus scrofa
ctgctcaggtgggtgggcga

SEQ ID NO: 2110 - DNA, 20 bp, Sus scrofa
gtgggtgggcgagggcaaga

SEQ ID NO: 2111 - DNA, 20 bp, Sus scrofa
tgggtgggcgagggcaagaa

SEQ ID NO: 2112 - DNA, 20 bp, Sus scrofa
gcgagggcaagaagggcccc

SEQ ID NO: 2113 - DNA, 20 bp, Sus scrofa
ccacctcaacaagaagcctg

SEQ ID NO: 2114 - DNA, 20 bp, Sus scrofa
tccacctcaacaagaagcct

SEQ ID NO: 2115 - DNA, 20 bp, Sus scrofa
ctccacctcaacaagaagcc

SEQ ID NO: 2116 - DNA, 20 bp, Sus scrofa
gggccccaggcttcttgttg

SEQ ID NO: 2117 - DNA, 20 bp, Sus scrofa
ccccaggcttcttgttgagg

SEQ ID NO: 2118 - DNA, 20 bp, Sus scrofa
gcttcttgttgaggtggagc

SEQ ID NO: 2119 - DNA, 20 bp, Sus scrofa
gagcaggggacctctgtgct

SEQ ID NO: 2120 - DNA, 20 bp, Sus scrofa
gcaacatcagccaagcacag

SEQ ID NO: 2121 - DNA, 20 bp, Sus scrofa
gggcaggggtgctagagcag

SEQ ID NO: 2122 - DNA, 20 bp, Sus scrofa
tgggcaggggtgctagagca

SEQ ID NO: 2123 - DNA, 20 bp, Sus scrofa
atgggcaggggtgctagagc

SEQ ID NO: 2124 - DNA, 20 bp, Sus scrofa
ccctaactcctgatgggcag

SEQ ID NO: 2125 - DNA, 20 bp, Sus scrofa
cccctaactcctgatgggca

SEQ ID NO: 2126 - DNA, 20 bp, Sus scrofa
gcccctaactcctgatgggc

SEQ ID NO: 2127 - DNA, 20 bp, Sus scrofa
ctctagcacccctgcccatc

SEQ ID NO: 2128 - DNA, 20 bp, Sus scrofa
gacagcccctaactcctgat

SEQ ID NO: 2129 - DNA, 20 bp, Sus scrofa
agacagcccctaactcctga

SEQ ID NO: 2130 - DNA, 20 bp, Sus scrofa
acccctgcccatcaggagtt

SEQ ID NO: 2131 - DNA, 20 bp, Sus scrofa
cccctgcccatcaggagtta

SEQ ID NO: 2132 - DNA, 20 bp, Sus scrofa
ccctgcccatcaggagttag

SEQ ID NO: 2133 - DNA, 20 bp, Sus scrofa
ctactggtacagagcaagac

SEQ ID NO: 2134 - DNA, 20 bp, Sus scrofa
tgagaggcaagtggtactac

SEQ ID NO: 2135 - DNA, 20 bp, Sus scrofa
ggagggagttgagaggcaag

SEQ ID NO: 2136 - DNA, 20 bp, Sus scrofa
gcagccaggagggagttgag

SEQ ID NO: 2137 - DNA, 20 bp, Sus scrofa
cttgcctctcaactccctcc

SEQ ID NO: 2138 - DNA, 20 bp, Sus scrofa
ctagagttctgcagccagga

SEQ ID NO: 2139 - DNA, 20 bp, Sus scrofa
cctagagttctgcagccagg

SEQ ID NO: 2140 - DNA, 20 bp, Sus scrofa
agacctagagttctgcagcc

SEQ ID NO: 2141 - DNA, 20 bp, Sus scrofa
cctcctggctgcagaactct

SEQ ID NO: 2142 - DNA, 20 bp, Sus scrofa
gaaagacaaaggcttgagag

SEQ ID NO: 2143 - DNA, 20 bp, Sus scrofa
tgaaagacaaaggcttgaga

SEQ ID NO: 2144 - DNA, 20 bp, Sus scrofa
atgaaagacaaaggcttgag

SEQ ID NO: 2145 - DNA, 20 bp, Sus scrofa
gccatttggatgaaagacaa

SEQ ID NO: 2146 - DNA, 20 bp, Sus scrofa
gcctttgtctttcatccaaa

SEQ ID NO: 2147 - DNA, 20 bp, Sus scrofa
gaaacttctcaggagccatt

SEQ ID NO: 2148 - DNA, 20 bp, Sus scrofa
cttcctgggggaaacttctc

SEQ ID NO: 2149 - DNA, 20 bp, Sus scrofa
gctcctgagaagtttccccc

SEQ ID NO: 2150 - DNA, 20 bp, Sus scrofa
agtcaaggaagacttcctgg

SEQ ID NO: 2151 - DNA, 20 bp, Sus scrofa
gagtcaaggaagacttcctg

SEQ ID NO: 2152 - DNA, 20 bp, Sus scrofa
tgagtcaaggaagacttcct

SEQ ID NO: 2153 - DNA, 20 bp, Sus scrofa
gtgagtcaaggaagacttcc

SEQ ID NO: 2154 - DNA, 20 bp, Sus scrofa
cccattattctagtgagtca

SEQ ID NO: 2155 - DNA, 20 bp, Sus scrofa
tccttgactcactagaataa

SEQ ID NO: 2156 - DNA, 20 bp, Sus scrofa
ccttgactcactagaataat

SEQ ID NO: 2157 - DNA, 20 bp, Sus scrofa
gaacaaattatgtccatccc

SEQ ID NO: 2158 - DNA, 20 bp, Sus scrofa
catcttgacatcacctggga

SEQ ID NO: 2159 - DNA, 20 bp, Sus scrofa
cttacatcttgacatcacct

SEQ ID NO: 2160 - DNA, 20 bp, Sus scrofa
tcttacatcttgacatcacc

SEQ ID NO: 2161 - DNA, 20 bp, Sus scrofa
gatgtcaagatgtaagatcc

SEQ ID NO: 2162 - DNA, 20 bp, Sus scrofa
atgtcaagatgtaagatcct

SEQ ID NO: 2163 - DNA, 20 bp, Sus scrofa
ctgtgtgacccggaagtccc

SEQ ID NO: 2164 - DNA, 20 bp, Sus scrofa
atgtaagatcctgggacttc

SEQ ID NO: 2165 - DNA, 20 bp, Sus scrofa
tgtaagatcctgggacttcc

SEQ ID NO: 2166 - DNA, 20 bp, Sus scrofa
gagaacactactgtgtgacc

SEQ ID NO: 2167 - DNA, 20 bp, Sus scrofa
agtgttctctctcctgacac

SEQ ID NO: 2168 - DNA, 20 bp, Sus scrofa
gtgttctctctcctgacact

SEQ ID NO: 2169 - DNA, 20 bp, Sus scrofa
aaggaggtgaccccagtgtc

SEQ ID NO: 2170 - DNA, 20 bp, Sus scrofa
tgttctctctcctgacactg

SEQ ID NO: 2171 - DNA, 20 bp, Sus scrofa
tgacactggggtcacctcct

SEQ ID NO: 2172 - DNA, 20 bp, Sus scrofa
ccatgatgcacactccaagg

SEQ ID NO: 2173 - DNA, 20 bp, Sus scrofa
gggccatgatgcacactcca

SEQ ID NO: 2174 - DNA, 20 bp, Sus scrofa
cctccttggagtgtgcatca

SEQ ID NO: 2175 - DNA, 20 bp, Sus scrofa
gaccaagccaagggaaagag

SEQ ID NO: 2176 - DNA, 20 bp, Sus scrofa
tgaccaagccaagggaaaga

SEQ ID NO: 2177 - DNA, 20 bp, Sus scrofa
ctgaccaagccaagggaaag

SEQ ID NO: 2178 - DNA, 20 bp, Sus scrofa
atcatggcccctctttccct

SEQ ID NO: 2179 - DNA, 20 bp, Sus scrofa
ggcccctctttcccttggct

SEQ ID NO: 2180 - DNA, 20 bp, Sus scrofa
agagacactgaccaagccaa

SEQ ID NO: 2181 - DNA, 20 bp, Sus scrofa
aagagacactgaccaagcca

SEQ ID NO: 2182 - DNA, 20 bp, Sus scrofa
cagcgaggccctctggcgag

SEQ ID NO: 2183 - DNA, 20 bp, Sus scrofa
tcagcgaggccctctggcga

SEQ ID NO: 2184 - DNA, 20 bp, Sus scrofa
ctctttaatcccctcgccag

SEQ ID NO: 2185 - DNA, 20 bp, Sus scrofa
ctcagcgaggccctctggcg

SEQ ID NO: 2186 - DNA, 20 bp, Sus scrofa
tctttaatcccctcgccaga

SEQ ID NO: 2187 - DNA, 20 bp, Sus scrofa
gaacactcagcgaggccctc

SEQ ID NO: 2188 - DNA, 20 bp, Sus scrofa
ggctctgggaacactcagcg

SEQ ID NO: 2189 - DNA, 20 bp, Sus scrofa
ggggagctgtcctgggctct

SEQ ID NO: 2190 - DNA, 20 bp, Sus scrofa
gctgagtgttcccagagccc

SEQ ID NO: 2191 - DNA, 20 bp, Sus scrofa
aggggagctgtcctgggctc

SEQ ID NO: 2192 - DNA, 20 bp, Sus scrofa
agctgcaggggagctgtcct

SEQ ID NO: 2193 - DNA, 20 bp, Sus scrofa
cagctgcaggggagctgtcc

SEQ ID NO: 2194 - DNA, 20 bp, Sus scrofa
cctgatgcacccagctgcag

SEQ ID NO: 2195 - DNA, 20 bp, Sus scrofa
caggacagctcccctgcagc

SEQ ID NO: 2196 - DNA, 20 bp, Sus scrofa
tcctgatgcacccagctgca

SEQ ID NO: 2197 - DNA, 20 bp, Sus scrofa
aggacagctcccctgcagct

SEQ ID NO: 2198 - DNA, 20 bp, Sus scrofa
ttcctgatgcacccagctgc

SEQ ID NO: 2199 - DNA, 20 bp, Sus scrofa
cccctgcagctgggtgcatc

SEQ ID NO: 2200 - DNA, 20 bp, Sus scrofa
tgcagctgggtgcatcagga

SEQ ID NO: 2201 - DNA, 20 bp, Sus scrofa
ggctctgtaatgatgtcatg

SEQ ID NO: 2202 - DNA, 20 bp, Sus scrofa
gccgccaggcgggaggctgg

SEQ ID NO: 2203 - DNA, 20 bp, Sus scrofa
ctggccgccaggcgggaggc

SEQ ID NO: 2204 - DNA, 20 bp, Sus scrofa
gtggcctccagcctcccgcc

SEQ ID NO: 2205 - DNA, 20 bp, Sus scrofa
cccactggccgccaggcggg

SEQ ID NO: 2206 - DNA, 20 bp, Sus scrofa
gcctccagcctcccgcctgg

SEQ ID NO: 2207 - DNA, 20 bp, Sus scrofa
cttcccactggccgccaggc

SEQ ID NO: 2208 - DNA, 20 bp, Sus scrofa
ccttcccactggccgccagg

SEQ ID NO: 2209 - DNA, 20 bp, Sus scrofa
gatccttcccactggccgcc

SEQ ID NO: 2210 - DNA, 20 bp, Sus scrofa
gcctcccgcctggcggccag

SEQ ID NO: 2211 - DNA, 20 bp, Sus scrofa
cctcccgcctggcggccagt

SEQ ID NO: 2212 - DNA, 20 bp, Sus scrofa
ccgcctggcggccagtggga

SEQ ID NO: 2213 - DNA, 20 bp, Sus scrofa
aacagacagatccttcccac

SEQ ID NO: 2214 - DNA, 20 bp, Sus scrofa
tgggaaggatctgtctgttc

SEQ ID NO: 2215 - DNA, 20 bp, Sus scrofa
ggatctgtctgttctggcac

SEQ ID NO: 2216 - DNA, 20 bp, Sus scrofa
gatctgtctgttctggcaca

SEQ ID NO: 2217 - DNA, 20 bp, Sus scrofa
atctgtctgttctggcacag

SEQ ID NO: 2218 - DNA, 20 bp, Sus scrofa
cctggccctccatatggaag

SEQ ID NO: 2219 - DNA, 20 bp, Sus scrofa
gcacaggggccgcttccata

SEQ ID NO: 2220 - DNA, 20 bp, Sus scrofa
caggggccgcttccatatgg

SEQ ID NO: 2221 - DNA, 20 bp, Sus scrofa
aggggccgcttccatatgga

SEQ ID NO: 2222 - DNA, 20 bp, Sus scrofa
ccagttcctggccctccata

SEQ ID NO: 2223 - DNA, 20 bp, Sus scrofa
ccgcttccatatggagggcc

SEQ ID NO: 2224 - DNA, 20 bp, Sus scrofa
ccatatggagggccaggaac

SEQ ID NO: 2225 - DNA, 20 bp, Sus scrofa
tgactgtgatggccagttcc

SEQ ID NO: 2226 - DNA, 20 bp, Sus scrofa
gaacgccccggtgactgtga

SEQ ID NO: 2227 - DNA, 20 bp, Sus scrofa
gaactggccatcacagtcac

SEQ ID NO: 2228 - DNA, 20 bp, Sus scrofa
aactggccatcacagtcacc

SEQ ID NO: 2229 - DNA, 20 bp, Sus scrofa
actggccatcacagtcaccg

SEQ ID NO: 2230 - DNA, 20 bp, Sus scrofa
cagcaatggaaggaacgccc

SEQ ID NO: 2231 - DNA, 20 bp, Sus scrofa
gggaaacatgcagcaatgga

SEQ ID NO: 2232 - DNA, 20 bp, Sus scrofa
ggaggggaaacatgcagcaa

SEQ ID NO: 2233 - DNA, 20 bp, Sus scrofa
tgagagcttccagaggggag

SEQ ID NO: 2234 - DNA, 20 bp, Sus scrofa
ctgagagcttccagagggga

SEQ ID NO: 2235 - DNA, 20 bp, Sus scrofa
tgcatgtttcccctcccctc

SEQ ID NO: 2236 - DNA, 20 bp, Sus scrofa
cctgagagcttccagagggg

SEQ ID NO: 2237 - DNA, 20 bp, Sus scrofa
acgcctgagagcttccagag

SEQ ID NO: 2238 - DNA, 20 bp, Sus scrofa
tacgcctgagagcttccaga

SEQ ID NO: 2239 - DNA, 20 bp, Sus scrofa
gtacgcctgagagcttccag

SEQ ID NO: 2240 - DNA, 20 bp, Sus scrofa
cctcccctctggaagctctc

SEQ ID NO: 2241 - DNA, 20 bp, Sus scrofa
actctccctgggttgcacag

SEQ ID NO: 2242 - DNA, 20 bp, Sus scrofa
cactctccctgggttgcaca

SEQ ID NO: 2243 - DNA, 20 bp, Sus scrofa
ccactctccctgggttgcac

SEQ ID NO: 2244 - DNA, 20 bp, Sus scrofa
ggcgtacccctgtgcaaccc

SEQ ID NO: 2245 - DNA, 20 bp, Sus scrofa
gcgtacccctgtgcaaccca

SEQ ID NO: 2246 - DNA, 20 bp, Sus scrofa
cacgcctgcccactctccct

SEQ ID NO: 2247 - DNA, 20 bp, Sus scrofa
ccacgcctgcccactctccc

SEQ ID NO: 2248 - DNA, 20 bp, Sus scrofa
cctgtgcaacccagggagag

SEQ ID NO: 2249 - DNA, 20 bp, Sus scrofa
ctgtgcaacccagggagagt

SEQ ID NO: 2250 - DNA, 20 bp, Sus scrofa
gcaacccagggagagtgggc

SEQ ID NO: 2251 - DNA, 20 bp, Sus scrofa
ccagggagagtgggcaggcg

SEQ ID NO: 2252 - DNA, 20 bp, Sus scrofa
gagagtgggcaggcgtggac

SEQ ID NO: 2253 - DNA, 20 bp, Sus scrofa
tcaggcctcccagacagctg

SEQ ID NO: 2254 - DNA, 20 bp, Sus scrofa
ttcaggcctcccagacagct

SEQ ID NO: 2255 - DNA, 20 bp, Sus scrofa
agtaaagctccccagctgtc

SEQ ID NO: 2256 - DNA, 20 bp, Sus scrofa
cttcaggcctcccagacagc

SEQ ID NO: 2257 - DNA, 20 bp, Sus scrofa
gtaaagctccccagctgtct

SEQ ID NO: 2258 - DNA, 20 bp, Sus scrofa
aagctccccagctgtctggg

SEQ ID NO: 2259 - DNA, 20 bp, Sus scrofa
acctctgcagaggtttcttc

SEQ ID NO: 2260 - DNA, 20 bp, Sus scrofa
gcctgaagaaacctctgcag

SEQ ID NO: 2261 - DNA, 20 bp, Sus scrofa
cagcaggccaacctctgcag

SEQ ID NO: 2262 - DNA, 20 bp, Sus scrofa
gaagaaacctctgcagaggt

SEQ ID NO: 2263 - DNA, 20 bp, Sus scrofa
gaaccactcattatggcagc

SEQ ID NO: 2264 - DNA, 20 bp, Sus scrofa
cagaggagaaccactcatta

SEQ ID NO: 2265 - DNA, 20 bp, Sus scrofa
tggcctgctgccataatgag

SEQ ID NO: 2266 - DNA, 20 bp, Sus scrofa
caagctagatgggagctcag

SEQ ID NO: 2267 - DNA, 20 bp, Sus scrofa
aacagagccacaagctagat

SEQ ID NO: 2268 - DNA, 20 bp, Sus scrofa
caacagagccacaagctaga

SEQ ID NO: 2269 - DNA, 20 bp, Sus scrofa
ctgagctcccatctagcttg

SEQ ID NO: 2270 - DNA, 20 bp, Sus scrofa
ctctcatccaagacacacaa

SEQ ID NO: 2271 - DNA, 20 bp, Sus scrofa
agacaagcctttgtgtgtct

SEQ ID NO: 2272 - DNA, 20 bp, Sus scrofa
tgtgtcttggatgagagagc

SEQ ID NO: 2273 - DNA, 20 bp, Sus scrofa
gctggtgtttttttacgctg

SEQ ID NO: 2274 - DNA, 20 bp, Sus scrofa
tgtttttttacgctgaggta

SEQ ID NO: 2275 - DNA, 20 bp, Sus scrofa
tgaggtatggtttctgagtc

SEQ ID NO: 2276 - DNA, 20 bp, Sus scrofa
gaggtatggtttctgagtct

SEQ ID NO: 2277 - DNA, 20 bp, Sus scrofa
aggtatggtttctgagtctg

SEQ ID NO: 2278 - DNA, 20 bp, Sus scrofa
tatggtttctgagtctgggg

SEQ ID NO: 2279 - DNA, 20 bp, Sus scrofa
tctggggaggcttctagtgt

SEQ ID NO: 2280 - DNA, 20 bp, Sus scrofa
ctggggaggcttctagtgta

SEQ ID NO: 2281 - DNA, 20 bp, Sus scrofa
ttctagtgtagggccctctg

SEQ ID NO: 2282 - DNA, 20 bp, Sus scrofa
ccccaaacagaggcctcaga

SEQ ID NO: 2283 - DNA, 20 bp, Sus scrofa
accccaaacagaggcctcag

SEQ ID NO: 2284 - DNA, 20 bp, Sus scrofa
ggccctctgaggcctctgtt

SEQ ID NO: 2285 - DNA, 20 bp, Sus scrofa
gccctctgaggcctctgttt

SEQ ID NO: 2286 - DNA, 20 bp, Sus scrofa
ctgtacctcaccccaaacag

SEQ ID NO: 2287 - DNA, 20 bp, Sus scrofa
ccctctgaggcctctgtttg

SEQ ID NO: 2288 - DNA, 20 bp, Sus scrofa
tgaggcctctgtttggggtg

SEQ ID NO: 2289 - DNA, 20 bp, Sus scrofa
ttggggtgaggtacagcagt

SEQ ID NO: 2290 - DNA, 20 bp, Sus scrofa
gtgaggtacagcagtaggca

SEQ ID NO: 2291 - DNA, 20 bp, Sus scrofa
tgaggtacagcagtaggcat

SEQ ID NO: 2292 - DNA, 20 bp, Sus scrofa
agtaggcatgggagaagaaa

SEQ ID NO: 2293 - DNA, 20 bp, Sus scrofa
tgggagaagaaatggaatgt

SEQ ID NO: 2294 - DNA, 20 bp, Sus scrofa
atgttggcttctcaaaagtg

SEQ ID NO: 2295 - DNA, 20 bp, Sus scrofa
tgttggcttctcaaaagtga

SEQ ID NO: 2296 - DNA, 20 bp, Sus scrofa
gttggcttctcaaaagtgag

SEQ ID NO: 2297 - DNA, 20 bp, Sus scrofa
tctcaaaagtgaggggtact

SEQ ID NO: 2298 - DNA, 20 bp, Sus scrofa
gggtacttggttcagatact

SEQ ID NO: 2299 - DNA, 20 bp, Sus scrofa
agatacctgaacatctacaa

SEQ ID NO: 2300 - DNA, 20 bp, Sus scrofa
cttggcctttgtagatgttc

SEQ ID NO: 2301 - DNA, 20 bp, Sus scrofa
cacactggccactggaacta

SEQ ID NO: 2302 - DNA, 20 bp, Sus scrofa
ccacactggccactggaact

SEQ ID NO: 2303 - DNA, 20 bp, Sus scrofa
gtatctttccctagttccag

SEQ ID NO: 2304 - DNA, 20 bp, Sus scrofa
acaatgaccacactggccac

SEQ ID NO: 2305 - DNA, 20 bp, Sus scrofa
cctagttccagtggccagtg

SEQ ID NO: 2306 - DNA, 20 bp, Sus scrofa
acttctgacaatgaccacac

SEQ ID NO: 2307 - DNA, 20 bp, Sus scrofa
agtgtggtcattgtcagaag

SEQ ID NO: 2308 - DNA, 20 bp, Sus scrofa
gtcagaagtggccacccatg

SEQ ID NO: 2309 - DNA, 20 bp, Sus scrofa
ccacatctgacccacatggg

SEQ ID NO: 2310 - DNA, 20 bp, Sus scrofa
tcagaagtggccacccatgt

SEQ ID NO: 2311 - DNA, 20 bp, Sus scrofa
ttcccacatctgacccacat

SEQ ID NO: 2312 - DNA, 20 bp, Sus scrofa
attcccacatctgacccaca

SEQ ID NO: 2313 - DNA, 20 bp, Sus scrofa
ccacccatgtgggtcagatg

SEQ ID NO: 2314 - DNA, 20 bp, Sus scrofa
cacccatgtgggtcagatgt

SEQ ID NO: 2315 - DNA, 20 bp, Sus scrofa
atgtgggtcagatgtgggaa

SEQ ID NO: 2316 - DNA, 20 bp, Sus scrofa
ggaatggaaaagcacctgtg

SEQ ID NO: 2317 - DNA, 20 bp, Sus scrofa
aggccatgcatcaacctcac

SEQ ID NO: 2318 - DNA, 20 bp, Sus scrofa
gcacctgtgaggttgatgca

SEQ ID NO: 2319 - DNA, 20 bp, Sus scrofa
ccagacctccctggaatcta

SEQ ID NO: 2320 - DNA, 20 bp, Sus scrofa
gatgcatggccttagattcc

SEQ ID NO: 2321 - DNA, 20 bp, Sus scrofa
atgcatggccttagattcca

SEQ ID NO: 2322 - DNA, 20 bp, Sus scrofa
catggccttagattccaggg

SEQ ID NO: 2323 - DNA, 20 bp, Sus scrofa
aagcaggatccagacctccc

SEQ ID NO: 2324 - DNA, 20 bp, Sus scrofa
ccttagattccagggaggtc

SEQ ID NO: 2325 - DNA, 20 bp, Sus scrofa
gaggtctggatcctgctttg

SEQ ID NO: 2326 - DNA, 20 bp, Sus scrofa
catagtggacacctcaaagc

SEQ ID NO: 2327 - DNA, 20 bp, Sus scrofa
aagtctggttttgggcatag

SEQ ID NO: 2328 - DNA, 20 bp, Sus scrofa
ctcaatataagtctggtttt

SEQ ID NO: 2329 - DNA, 20 bp, Sus scrofa
actcaatataagtctggttt

SEQ ID NO: 2330 - DNA, 20 bp, Sus scrofa
gcatgcactcaatataagtc

SEQ ID NO: 2331 - DNA, 20 bp, Sus scrofa
taagactcctggggctagca

SEQ ID NO: 2332 - DNA, 20 bp, Sus scrofa
gtgcatgccttgctagcccc

SEQ ID NO: 2333 - DNA, 20 bp, Sus scrofa
tggccattttaagactcctg

SEQ ID NO: 2334 - DNA, 20 bp, Sus scrofa
gtggccattttaagactcct

SEQ ID NO: 2335 - DNA, 20 bp, Sus scrofa
tgtggccattttaagactcc

SEQ ID NO: 2336 - DNA, 20 bp, Sus scrofa
tagccccaggagtcttaaaa

SEQ ID NO: 2337 - DNA, 20 bp, Sus scrofa
ctgctcatcagggacatctg

SEQ ID NO: 2338 - DNA, 20 bp, Sus scrofa
ccagtcactgctgctcatca

SEQ ID NO: 2339 - DNA, 20 bp, Sus scrofa
gccagtcactgctgctcatc

SEQ ID NO: 2340 - DNA, 20 bp, Sus scrofa
ccctgatgagcagcagtgac

SEQ ID NO: 2341 - DNA, 20 bp, Sus scrofa
atgagcagcagtgactggct

SEQ ID NO: 2342 - DNA, 20 bp, Sus scrofa
tgagcagcagtgactggcta

SEQ ID NO: 2343 - DNA, 20 bp, Sus scrofa
cagtgactggctagggcctg

SEQ ID NO: 2344 - DNA, 20 bp, Sus scrofa
tcctaactctggttaacctc

SEQ ID NO: 2345 - DNA, 20 bp, Sus scrofa
gcctgaggttaaccagagtt

SEQ ID NO: 2346 - DNA, 20 bp, Sus scrofa
agaaatcaccctcctaactc

SEQ ID NO: 2347 - DNA, 20 bp, Sus scrofa
tgaggttaaccagagttagg

SEQ ID NO: 2348 - DNA, 20 bp, Sus scrofa
gaggttaaccagagttagga

SEQ ID NO: 2349 - DNA, 20 bp, Sus scrofa
tctgcagatagaaaatactg

SEQ ID NO: 2350 - DNA, 20 bp, Sus scrofa
gcagatagaaaatactgcgg

SEQ ID NO: 2351 - DNA, 20 bp, Sus scrofa
ttgattgaatgcctgccacg

SEQ ID NO: 2352 - DNA, 20 bp, Sus scrofa
aacacaactcaccacgtggc

SEQ ID NO: 2353 - DNA, 20 bp, Sus scrofa
tcagaacacaactcaccacg

SEQ ID NO: 2354 - DNA, 20 bp, Sus scrofa
gagttgtgttctgagcattc

SEQ ID NO: 2355 - DNA, 20 bp, Sus scrofa
ttctggatatagcagtgaac

SEQ ID NO: 2356 - DNA, 20 bp, Sus scrofa
atatagcagtgaacaggaga

SEQ ID NO: 2357 - DNA, 20 bp, Sus scrofa
aacaggagaaggtcattatt

SEQ ID NO: 2358 - DNA, 20 bp, Sus scrofa
acaggagaaggtcattattt

SEQ ID NO: 2359 - DNA, 20 bp, Sus scrofa
cattatttgggctgcccctg

SEQ ID NO: 2360 - DNA, 20 bp, Sus scrofa
attatttgggctgcccctgt

SEQ ID NO: 2361 - DNA, 20 bp, Sus scrofa
ttatttgggctgcccctgtg

SEQ ID NO: 2362 - DNA, 20 bp, Sus scrofa
atggaatggaagccccacag

SEQ ID NO: 2363 - DNA, 20 bp, Sus scrofa
gatggaatggaagccccaca

SEQ ID NO: 2364 - DNA, 20 bp, Sus scrofa
tgatggaatggaagccccac

SEQ ID NO: 2365 - DNA, 20 bp, Sus scrofa
aatggtttcccttgatggaa

SEQ ID NO: 2366 - DNA, 20 bp, Sus scrofa
gtggggcttccattccatca

SEQ ID NO: 2367 - DNA, 20 bp, Sus scrofa
tggggcttccattccatcaa

SEQ ID NO: 2368 - DNA, 20 bp, Sus scrofa
ttattaatggtttcccttga

SEQ ID NO: 2369 - DNA, 20 bp, Sus scrofa
gcctttgattgacttattaa

SEQ ID NO: 2370 - DNA, 20 bp, Sus scrofa
accattaataagtcaatcaa

SEQ ID NO: 2371 - DNA, 20 bp, Sus scrofa
tcaatcaaaggcatgactgc

SEQ ID NO: 2372 - DNA, 20 bp, Sus scrofa
ggcatgactgctggtgtgat

SEQ ID NO: 2373 - DNA, 20 bp, Sus scrofa
aaacataaagctgtgttaaa

SEQ ID NO: 2374 - DNA, 20 bp, Sus scrofa
aacataaagctgtgttaaaa

SEQ ID NO: 2375 - DNA, 20 bp, Sus scrofa
aagctgtgttaaaagggact

SEQ ID NO: 2376 - DNA, 20 bp, Sus scrofa
ctgtgttaaaagggactagg

SEQ ID NO: 2377 - DNA, 20 bp, Sus scrofa
taaaagggactaggtggtcc

SEQ ID NO: 2378 - DNA, 20 bp, Sus scrofa
agggactaggtggtccagga

SEQ ID NO: 2379 - DNA, 20 bp, Sus scrofa
cctcctcagagaagccttcc

SEQ ID NO: 2380 - DNA, 20 bp, Sus scrofa
ggtccaggaaggcttctctg

SEQ ID NO: 2381 - DNA, 20 bp, Sus scrofa
ccaggaaggcttctctgagg

SEQ ID NO: 2382 - DNA, 20 bp, Sus scrofa
ggaaggcttctctgaggagg

SEQ ID NO: 2383 - DNA, 20 bp, Sus scrofa
gggtgccagaagtctagtgt

SEQ ID NO: 2384 - DNA, 20 bp, Sus scrofa
agtaacctacactagacttc

SEQ ID NO: 2385 - DNA, 20 bp, Sus scrofa
ctctacaggtcctggctcat

SEQ ID NO: 2386 - DNA, 20 bp, Sus scrofa
acttctggcacccatgagcc

SEQ ID NO: 2387 - DNA, 20 bp, Sus scrofa
cctctacaggtcctggctca

SEQ ID NO: 2388 - DNA, 20 bp, Sus scrofa
ctaggtacctctacaggtcc

SEQ ID NO: 2389 - DNA, 20 bp, Sus scrofa
ccatgagccaggacctgtag

SEQ ID NO: 2390 - DNA, 20 bp, Sus scrofa
gagttcctaggtacctctac

SEQ ID NO: 2391 - DNA, 20 bp, Sus scrofa
caggacctgtagaggtacct

SEQ ID NO: 2392 - DNA, 20 bp, Sus scrofa
tcctcagcaagagagttcct

SEQ ID NO: 2393 - DNA, 20 bp, Sus scrofa
acctaggaactctcttgctg

SEQ ID NO: 2394 - DNA, 20 bp, Sus scrofa
tcttgctgaggagcaagctg

SEQ ID NO: 2395 - DNA, 20 bp, Sus scrofa
gagcaagctgaggcccagaa

SEQ ID NO: 2396 - DNA, 20 bp, Sus scrofa
attcaagtcttatcctttct

SEQ ID NO: 2397 - DNA, 20 bp, Sus scrofa
aattcaagtcttatcctttc

SEQ ID NO: 2398 - DNA, 20 bp, Sus scrofa
gaattcatgagctgattaat

SEQ ID NO: 2399 - DNA, 20 bp, Sus scrofa
gtttgtcactcttttgtttc

SEQ ID NO: 2400 - DNA, 20 bp, Sus scrofa
aaaagagtgacaaactgtaa

SEQ ID NO: 2401 - DNA, 20 bp, Sus scrofa
aaagagtgacaaactgtaat

SEQ ID NO: 2402 - DNA, 20 bp, Sus scrofa
aggttgaaaacagggagtac

SEQ ID NO: 2403 - DNA, 20 bp, Sus scrofa
cacgcctaaggttgaaaaca

SEQ ID NO: 2404 - DNA, 20 bp, Sus scrofa
acacgcctaaggttgaaaac

SEQ ID NO: 2405 - DNA, 20 bp, Sus scrofa
tactccctgttttcaacctt

SEQ ID NO: 2406 - DNA, 20 bp, Sus scrofa
ttggcctggggacacgccta

SEQ ID NO: 2407 - DNA, 20 bp, Sus scrofa
tcaaccttaggcgtgtcccc

SEQ ID NO: 2408 - DNA, 20 bp, Sus scrofa
gcagagggtcagttggcctg

SEQ ID NO: 2409 - DNA, 20 bp, Sus scrofa
ggcagagggtcagttggcct

SEQ ID NO: 2410 - DNA, 20 bp, Sus scrofa
aggcagagggtcagttggcc

SEQ ID NO: 2411 - DNA, 20 bp, Sus scrofa
cgaaaaggcagagggtcagt

SEQ ID NO: 2412 - DNA, 20 bp, Sus scrofa
ttctgggacgaaaaggcaga

SEQ ID NO: 2413 - DNA, 20 bp, Sus scrofa
attctgggacgaaaaggcag

SEQ ID NO: 2414 - DNA, 20 bp, Sus scrofa
aaggacattctgggacgaaa

SEQ ID NO: 2415 - DNA, 20 bp, Sus scrofa
aggataataaaggacattct

SEQ ID NO: 2416 - DNA, 20 bp, Sus scrofa
gaggataataaaggacattc

SEQ ID NO: 2417 - DNA, 20 bp, Sus scrofa
aagtctcaagaggataataa

SEQ ID NO: 2418 - DNA, 20 bp, Sus scrofa
ttaaaaagctaagtctcaag

SEQ ID NO: 2419 - DNA, 20 bp, Sus scrofa
cattgttaataaacacaatt

SEQ ID NO: 2420 - DNA, 20 bp, Sus scrofa
caaattgtgtttattaacaa

SEQ ID NO: 2421 - DNA, 20 bp, Sus scrofa
ttgtgtttattaacaatggt

SEQ ID NO: 2422 - DNA, 20 bp, Sus scrofa
gtactcagccacaaatgaga

SEQ ID NO: 2423 - DNA, 20 bp, Sus scrofa
taggtttaccttctcatttg

SEQ ID NO: 2424 - DNA, 20 bp, Sus scrofa
atttgtggctgagtacgttg

SEQ ID NO: 2425 - DNA, 20 bp, Sus scrofa
gctgagtacgttgaggagag

SEQ ID NO: 2426 - DNA, 20 bp, Sus scrofa
ctgagtacgttgaggagagt

SEQ ID NO: 2427 - DNA, 20 bp, Sus scrofa
tgagtacgttgaggagagtg

SEQ ID NO: 2428 - DNA, 20 bp, Sus scrofa
ttgcctggggggatgactgg

SEQ ID NO: 2429 - DNA, 20 bp, Sus scrofa
cccttgcctggggggatgac

SEQ ID NO: 2430 - DNA, 20 bp, Sus scrofa
taaccgccagtcatcccccc

SEQ ID NO: 2431 - DNA, 20 bp, Sus scrofa
gtgctgagcccttgcctggg

SEQ ID NO: 2432 - DNA, 20 bp, Sus scrofa
ggtgctgagcccttgcctgg

SEQ ID NO: 2433 - DNA, 20 bp, Sus scrofa
gccagtcatccccccaggca

SEQ ID NO: 2434 - DNA, 20 bp, Sus scrofa
aggtgctgagcccttgcctg

SEQ ID NO: 2435 - DNA, 20 bp, Sus scrofa
ccagtcatccccccaggcaa

SEQ ID NO: 2436 - DNA, 20 bp, Sus scrofa
caggtgctgagcccttgcct

SEQ ID NO: 2437 - DNA, 20 bp, Sus scrofa
ccaggtgctgagcccttgcc

SEQ ID NO: 2438 - DNA, 20 bp, Sus scrofa
ccaggcaagggctcagcacc

SEQ ID NO: 2439 - DNA, 20 bp, Sus scrofa
aagggctcagcacctggaac

SEQ ID NO: 2440 - DNA, 20 bp, Sus scrofa
acaggaacaaggccagttcc

SEQ ID NO: 2441 - DNA, 20 bp, Sus scrofa
tctctgctgagacaggaaca

SEQ ID NO: 2442 - DNA, 20 bp, Sus scrofa
ggccacatctctgctgagac

SEQ ID NO: 2443 - DNA, 20 bp, Sus scrofa
ttcctgtctcagcagagatg

SEQ ID NO: 2444 - DNA, 20 bp, Sus scrofa
agcagagatgtggcccagtt

SEQ ID NO: 2445 - DNA, 20 bp, Sus scrofa
gcagagatgtggcccagttt

SEQ ID NO: 2446 - DNA, 20 bp, Sus scrofa
agcctgtggttacccaaact

SEQ ID NO: 2447 - DNA, 20 bp, Sus scrofa
gagcctgtggttacccaaac

SEQ ID NO: 2448 - DNA, 20 bp, Sus scrofa
ggcccagtttgggtaaccac

SEQ ID NO: 2449 - DNA, 20 bp, Sus scrofa
tgccaggcagcgagagcctg

SEQ ID NO: 2450 - DNA, 20 bp, Sus scrofa
aaccacaggctctcgctgcc

SEQ ID NO: 2451 - DNA, 20 bp, Sus scrofa
gatggaaatcccactgtgcc

SEQ ID NO: 2452 - DNA, 20 bp, Sus scrofa
gctctcgctgcctggcacag

SEQ ID NO: 2453 - DNA, 20 bp, Sus scrofa
ctctcgctgcctggcacagt

SEQ ID NO: 2454 - DNA, 20 bp, Sus scrofa
aactatttcagaaggacaga

SEQ ID NO: 2455 - DNA, 20 bp, Sus scrofa
agtcaagaaactatttcaga

SEQ ID NO: 2456 - DNA, 20 bp, Sus scrofa
gtttcttgactgctactttt

SEQ ID NO: 2457 - DNA, 20 bp, Sus scrofa
tttcttgactgctacttttt

SEQ ID NO: 2458 - DNA, 20 bp, Sus scrofa
gctactttttgggttccatt

SEQ ID NO: 2459 - DNA, 20 bp, Sus scrofa
gagggcctgaaggatccaaa

SEQ ID NO: 2460 - DNA, 20 bp, Sus scrofa
gggttccatttggatccttc

SEQ ID NO: 2461 - DNA, 20 bp, Sus scrofa
aaccaggtgagagggcctga

SEQ ID NO: 2462 - DNA, 20 bp, Sus scrofa
gcccctcaaaccaggtgaga

SEQ ID NO: 2463 - DNA, 20 bp, Sus scrofa
atccttcaggccctctcacc

SEQ ID NO: 2464 - DNA, 20 bp, Sus scrofa
ggcccctcaaaccaggtgag

SEQ ID NO: 2465 - DNA, 20 bp, Sus scrofa
aggccctctcacctggtttg

SEQ ID NO: 2466 - DNA, 20 bp, Sus scrofa
agcatctggcccctcaaacc

SEQ ID NO: 2467 - DNA, 20 bp, Sus scrofa
ggccctctcacctggtttga

SEQ ID NO: 2468 - DNA, 20 bp, Sus scrofa
gccctctcacctggtttgag

SEQ ID NO: 2469 - DNA, 20 bp, Sus scrofa
ctttgctcacccaaagcatc

SEQ ID NO: 2470 - DNA, 20 bp, Sus scrofa
gtttgaggggccagatgctt

SEQ ID NO: 2471 - DNA, 20 bp, Sus scrofa
tttgaggggccagatgcttt

SEQ ID NO: 2472 - DNA, 20 bp, Sus scrofa
cagatgctttgggtgagcaa

SEQ ID NO: 2473 - DNA, 20 bp, Sus scrofa
ccttcatcagaggtttcagc

SEQ ID NO: 2474 - DNA, 20 bp, Sus scrofa
gcctcaccacccttcatcag

SEQ ID NO: 2475 - DNA, 20 bp, Sus scrofa
cctgctgaaacctctgatga

SEQ ID NO: 2476 - DNA, 20 bp, Sus scrofa
ctgctgaaacctctgatgaa

SEQ ID NO: 2477 - DNA, 20 bp, Sus scrofa
ctgaaacctctgatgaaggg

SEQ ID NO: 2478 - DNA, 20 bp, Sus scrofa
acctctgatgaagggtggtg

SEQ ID NO: 2479 - DNA, 20 bp, Sus scrofa
ctgatgaagggtggtgaggc

SEQ ID NO: 2480 - DNA, 20 bp, Sus scrofa
tgatgaagggtggtgaggcc

SEQ ID NO: 2481 - DNA, 20 bp, Sus scrofa
aagggtggtgaggccgggct

SEQ ID NO: 2482 - DNA, 20 bp, Sus scrofa
agccctagggcctccaagcc

SEQ ID NO: 2483 - DNA, 20 bp, Sus scrofa
ggtggtgaggccgggcttgg

SEQ ID NO: 2484 - DNA, 20 bp, Sus scrofa
aggccgggcttggaggccct

SEQ ID NO: 2485 - DNA, 20 bp, Sus scrofa
ggccgggcttggaggcccta

SEQ ID NO: 2486 - DNA, 20 bp, Sus scrofa
tccccttaaaataagcccta

SEQ ID NO: 2487 - DNA, 20 bp, Sus scrofa
ctccccttaaaataagccct

SEQ ID NO: 2488 - DNA, 20 bp, Sus scrofa
aggccctagggcttatttta

SEQ ID NO: 2489 - DNA, 20 bp, Sus scrofa
ggccctagggcttattttaa

SEQ ID NO: 2490 - DNA, 20 bp, Sus scrofa
gccctagggcttattttaag

SEQ ID NO: 2491 - DNA, 20 bp, Sus scrofa
aaggggagaaatccacagtc

SEQ ID NO: 2492 - DNA, 20 bp, Sus scrofa
ctggatttgtgacctgactg

SEQ ID NO: 2493 - DNA, 20 bp, Sus scrofa
tgggagaggtgggtcatggc

SEQ ID NO: 2494 - DNA, 20 bp, Sus scrofa
tccttgggagaggtgggtca

SEQ ID NO: 2495 - DNA, 20 bp, Sus scrofa
tcccggtccttgggagaggt

SEQ ID NO: 2496 - DNA, 20 bp, Sus scrofa
atcccggtccttgggagagg

SEQ ID NO: 2497 - DNA, 20 bp, Sus scrofa
gccatgacccacctctccca

SEQ ID NO: 2498 - DNA, 20 bp, Sus scrofa
ctcatcccggtccttgggag

SEQ ID NO: 2499 - DNA, 20 bp, Sus scrofa
gacccacctctcccaaggac

SEQ ID NO: 2500 - DNA, 20 bp, Sus scrofa
taaggctcatcccggtcctt

SEQ ID NO: 2501 - DNA, 20 bp, Sus scrofa
acccacctctcccaaggacc

SEQ ID NO: 2502 - DNA, 20 bp, Sus scrofa
ttaaggctcatcccggtcct

SEQ ID NO: 2503 - DNA, 20 bp, Sus scrofa
cagccaattaaggctcatcc

SEQ ID NO: 2504 - DNA, 20 bp, Sus scrofa
ggaccgggatgagccttaat

SEQ ID NO: 2505 - DNA, 20 bp, Sus scrofa
tgaaaactctcagccaatta

SEQ ID NO: 2506 - DNA, 20 bp, Sus scrofa
gagagttttcatctaaaagc

SEQ ID NO: 2507 - DNA, 20 bp, Sus scrofa
gcatcttgcatgaatatgaa

SEQ ID NO: 2508 - DNA, 20 bp, Sus scrofa
acttcattaatcagcctgtt

SEQ ID NO: 2509 - DNA, 20 bp, Sus scrofa
tgggaagccagattcctaac

SEQ ID NO: 2510 - DNA, 20 bp, Sus scrofa
taatcagcctgttaggaatc

SEQ ID NO: 2511 - DNA, 20 bp, Sus scrofa
tatccagcccccataatact

SEQ ID NO: 2512 - DNA, 20 bp, Sus scrofa
aatctggcttcccagtatta

SEQ ID NO: 2513 - DNA, 20 bp, Sus scrofa
ttatccagcccccataatac

SEQ ID NO: 2514 - DNA, 20 bp, Sus scrofa
atctggcttcccagtattat

SEQ ID NO: 2515 - DNA, 20 bp, Sus scrofa
tctggcttcccagtattatg

SEQ ID NO: 2516 - DNA, 20 bp, Sus scrofa
ctggcttcccagtattatgg

SEQ ID NO: 2517 - DNA, 20 bp, Sus scrofa
cttcccagtattatgggggc

SEQ ID NO: 2518 - DNA, 20 bp, Sus scrofa
gttgtgctttcagcttataa

SEQ ID NO: 2519 - DNA, 20 bp, Sus scrofa
ttgtgctttcagcttataaa

SEQ ID NO: 2520 - DNA, 20 bp, Sus scrofa
gctttcagcttataaaggga

SEQ ID NO: 2521 - DNA, 20 bp, Sus scrofa
gtttttaactgttgagtatc

SEQ ID NO: 2522 - DNA, 20 bp, Sus scrofa
tttttaactgttgagtatct

SEQ ID NO: 2523 - DNA, 20 bp, Sus scrofa
gtaagaataaatatggtgtc

SEQ ID NO: 2524 - DNA, 20 bp, Sus scrofa
agattaagtaagaataaata

SEQ ID NO: 2525 - DNA, 20 bp, Sus scrofa
tagaaagactacagaatgaa

SEQ ID NO: 2526 - DNA, 20 bp, Sus scrofa
agaaagactacagaatgaat

SEQ ID NO: 2527 - DNA, 20 bp, Sus scrofa
tgagcctcatctacgaaagt

SEQ ID NO: 2528 - DNA, 20 bp, Sus scrofa
ctgagcctcatctacgaaag

SEQ ID NO: 2529 - DNA, 20 bp, Sus scrofa
tattcccactttcgtagatg

SEQ ID NO: 2530 - DNA, 20 bp, Sus scrofa
ctagtgaagtgtctagctca

SEQ ID NO: 2531 - DNA, 20 bp, Sus scrofa
ctcaaggtcatatagtactg

SEQ ID NO: 2532 - DNA, 20 bp, Sus scrofa
atagtactgtggagcagtgc

SEQ ID NO: 2533 - DNA, 20 bp, Sus scrofa
tagtactgtggagcagtgct

SEQ ID NO: 2534 - DNA, 20 bp, Sus scrofa
gcagtgctgggtacaaagcc

SEQ ID NO: 2535 - DNA, 20 bp, Sus scrofa
tgggtacaaagccaggccac

SEQ ID NO: 2536 - DNA, 20 bp, Sus scrofa
aaggtgtgaagccagtggcc

SEQ ID NO: 2537 - DNA, 20 bp, Sus scrofa
aagttaaggtgtgaagccag

SEQ ID NO: 2538 - DNA, 20 bp, Sus scrofa
gaggtaagaggtcaaagtta

SEQ ID NO: 2539 - DNA, 20 bp, Sus scrofa
agtggctgggaggaggtaag

SEQ ID NO: 2540 - DNA, 20 bp, Sus scrofa
gccctaaagtggctgggagg

SEQ ID NO: 2541 - DNA, 20 bp, Sus scrofa
gcagccctaaagtggctggg

SEQ ID NO: 2542 - DNA, 20 bp, Sus scrofa
gcagcagccctaaagtggct

SEQ ID NO: 2543 - DNA, 20 bp, Sus scrofa
agcagcagccctaaagtggc

SEQ ID NO: 2544 - DNA, 20 bp, Sus scrofa
tacctcctcccagccacttt

SEQ ID NO: 2545 - DNA, 20 bp, Sus scrofa
acctcctcccagccacttta

SEQ ID NO: 2546 - DNA, 20 bp, Sus scrofa
tattagcagcagccctaaag

SEQ ID NO: 2547 - DNA, 20 bp, Sus scrofa
ctttagggctgctgctaata

SEQ ID NO: 2548 - DNA, 20 bp, Sus scrofa
aagagaaagaaatgaaagtt

SEQ ID NO: 2549 - DNA, 20 bp, Sus scrofa
catctgtttcactttcttgg

SEQ ID NO: 2550 - DNA, 20 bp, Sus scrofa
tcatctgtttcactttcttg

SEQ ID NO: 2551 - DNA, 20 bp, Sus scrofa
atcatctgtttcactttctt

SEQ ID NO: 2552 - DNA, 20 bp, Sus scrofa
tatcatctgtttcactttct

SEQ ID NO: 2553 - DNA, 20 bp, Sus scrofa
tagaatacattgtaaatgtg

SEQ ID NO: 2554 - DNA, 20 bp, Sus scrofa
aaaggggaaaaaaaatctaa

SEQ ID NO: 2555 - DNA, 20 bp, Sus scrofa
tgtaaaagaatcatttaaag

SEQ ID NO: 2556 - DNA, 20 bp, Sus scrofa
gtgtaaaagaatcatttaaa

SEQ ID NO: 2557 - DNA, 20 bp, Sus scrofa
agtgtaaaagaatcatttaa

SEQ ID NO: 2558 - DNA, 20 bp, Sus scrofa
aatgattcttttacactatc

SEQ ID NO: 2559 - DNA, 20 bp, Sus scrofa
atgattcttttacactatca

SEQ ID NO: 2560 - DNA, 20 bp, Sus scrofa
tatggaaagttgattttgct

SEQ ID NO: 2561 - DNA, 20 bp, Sus scrofa
atatggaaagttgattttgc

SEQ ID NO: 2562 - DNA, 20 bp, Sus scrofa
gaaaggtcaggacaggcata

SEQ ID NO: 2563 - DNA, 20 bp, Sus scrofa
tggcacagaaaggtcaggac

SEQ ID NO: 2564 - DNA, 20 bp, Sus scrofa
gaccctggcacagaaaggtc

SEQ ID NO: 2565 - DNA, 20 bp, Sus scrofa
attaagaccctggcacagaa

SEQ ID NO: 2566 - DNA, 20 bp, Sus scrofa
tgtcctgacctttctgtgcc

SEQ ID NO: 2567 - DNA, 20 bp, Sus scrofa
gtcctgacctttctgtgcca

SEQ ID NO: 2568 - DNA, 20 bp, Sus scrofa
acacacatatattaagaccc

SEQ ID NO: 2569 - DNA, 20 bp, Sus scrofa
ggtcttaatatatgtgtgtc

SEQ ID NO: 2570 - DNA, 20 bp, Sus scrofa
gtcttaatatatgtgtgtct

SEQ ID NO: 2571 - DNA, 20 bp, Sus scrofa
aagtatattagagctgtcag

SEQ ID NO: 2572 - DNA, 20 bp, Sus scrofa
tctaatatacttcaaacatg

SEQ ID NO: 2573 - DNA, 20 bp, Sus scrofa
ctaatatacttcaaacatga

SEQ ID NO: 2574 - DNA, 20 bp, Sus scrofa
tatcctaagtactttctcat

SEQ ID NO: 2575 - DNA, 20 bp, Sus scrofa
atgccaatgagaaagtactt

SEQ ID NO: 2576 - DNA, 20 bp, Sus scrofa
agaccctctttcacactttg

SEQ ID NO: 2577 - DNA, 20 bp, Sus scrofa
gatacctcaaagtgtgaaag

SEQ ID NO: 2578 - DNA, 20 bp, Sus scrofa
atacctcaaagtgtgaaaga

SEQ ID NO: 2579 - DNA, 20 bp, Sus scrofa
tcaaagtgtgaaagagggtc

SEQ ID NO: 2580 - DNA, 20 bp, Sus scrofa
gtgaaagagggtctggaaag

SEQ ID NO: 2581 - DNA, 20 bp, Sus scrofa
tgaaagagggtctggaaagt

SEQ ID NO: 2582 - DNA, 20 bp, Sus scrofa
aagagggtctggaaagtggg

SEQ ID NO: 2583 - DNA, 20 bp, Sus scrofa
acttttattggaggacgatt

SEQ ID NO: 2584 - DNA, 20 bp, Sus scrofa
tcttaggcaacttttattgg

SEQ ID NO: 2585 - DNA, 20 bp, Sus scrofa
ttgtcttaggcaacttttat

SEQ ID NO: 2586 - DNA, 20 bp, Sus scrofa
cctaagccccaagttgtctt

SEQ ID NO: 2587 - DNA, 20 bp, Sus scrofa
aaaagttgcctaagacaact

SEQ ID NO: 2588 - DNA, 20 bp, Sus scrofa
aaagttgcctaagacaactt

SEQ ID NO: 2589 - DNA, 20 bp, Sus scrofa
aagttgcctaagacaacttg

SEQ ID NO: 2590 - DNA, 20 bp, Sus scrofa
cctaagacaacttggggctt

SEQ ID NO: 2591 - DNA, 20 bp, Sus scrofa
acacttccccttgggaaagg

SEQ ID NO: 2592 - DNA, 20 bp, Sus scrofa
aatgcattccacctttccca

SEQ ID NO: 2593 - DNA, 20 bp, Sus scrofa
acaacacttccccttgggaa

SEQ ID NO: 2594 - DNA, 20 bp, Sus scrofa
atgcattccacctttcccaa

SEQ ID NO: 2595 - DNA, 20 bp, Sus scrofa
tgcattccacctttcccaag

SEQ ID NO: 2596 - DNA, 20 bp, Sus scrofa
cattcacaacacttcccctt

SEQ ID NO: 2597 - DNA, 20 bp, Sus scrofa
ccattcacaacacttcccct

SEQ ID NO: 2598 - DNA, 20 bp, Sus scrofa
ccaaggggaagtgttgtgaa

SEQ ID NO: 2599 - DNA, 20 bp, Sus scrofa
caaggggaagtgttgtgaat

SEQ ID NO: 2600 - DNA, 20 bp, Sus scrofa
ggaagtgttgtgaatgggca

SEQ ID NO: 2601 - DNA, 20 bp, Sus scrofa
tcaacaaagggcaagaaaca

SEQ ID NO: 2602 - DNA, 20 bp, Sus scrofa
tggagcaggtgctcaacaaa

SEQ ID NO: 2603 - DNA, 20 bp, Sus scrofa
ttggagcaggtgctcaacaa

SEQ ID NO: 2604 - DNA, 20 bp, Sus scrofa
catgaagcaaggcttggagc

SEQ ID NO: 2605 - DNA, 20 bp, Sus scrofa
acctagcatgaagcaaggct

SEQ ID NO: 2606 - DNA, 20 bp, Sus scrofa
caaaaacctagcatgaagca

SEQ ID NO: 2607 - DNA, 20 bp, Sus scrofa
tccaagccttgcttcatgct

SEQ ID NO: 2608 - DNA, 20 bp, Sus scrofa
cttgcttcatgctaggtttt

SEQ ID NO: 2609 - DNA, 20 bp, Sus scrofa
gtatcctaggggcattctaa

SEQ ID NO: 2610 - DNA, 20 bp, Sus scrofa
gaatcctttagaatgcccct

SEQ ID NO: 2611 - DNA, 20 bp, Sus scrofa
tggtcacacctgtatcctag

SEQ ID NO: 2612 - DNA, 20 bp, Sus scrofa
gtggtcacacctgtatccta

SEQ ID NO: 2613 - DNA, 20 bp, Sus scrofa
agtggtcacacctgtatcct

SEQ ID NO: 2614 - DNA, 20 bp, Sus scrofa
ttagaatgcccctaggatac

SEQ ID NO: 2615 - DNA, 20 bp, Sus scrofa
gtctctatctggtaacggag

SEQ ID NO: 2616 - DNA, 20 bp, Sus scrofa
cctgtgtctctatctggtaa

SEQ ID NO: 2617 - DNA, 20 bp, Sus scrofa
tgtggacctgtgtctctatc

SEQ ID NO: 2618 - DNA, 20 bp, Sus scrofa
ccgttaccagatagagacac

SEQ ID NO: 2619 - DNA, 20 bp, Sus scrofa
atagagacacaggtccacag

SEQ ID NO: 2620 - DNA, 20 bp, Sus scrofa
tgaaggccatctgacctctg

SEQ ID NO: 2621 - DNA, 20 bp, Sus scrofa
acaggtccacagaggtcaga

SEQ ID NO: 2622 - DNA, 20 bp, Sus scrofa
acagaggtcagatggccttc

SEQ ID NO: 2623 - DNA, 20 bp, Sus scrofa
gcaagttcagtgtgtcctga

SEQ ID NO: 2624 - DNA, 20 bp, Sus scrofa
gggactgctacagcacacag

SEQ ID NO: 2625 - DNA, 20 bp, Sus scrofa
agggactgctacagcacaca

SEQ ID NO: 2626 - DNA, 20 bp, Sus scrofa
aagggactgctacagcacac

SEQ ID NO: 2627 - DNA, 20 bp, Sus scrofa
tctgggatggacaagcagaa

SEQ ID NO: 2628 - DNA, 20 bp, Sus scrofa
gtctgggatggacaagcaga

SEQ ID NO: 2629 - DNA, 20 bp, Sus scrofa
ccaaagtgtccagtctggga

SEQ ID NO: 2630 - DNA, 20 bp, Sus scrofa
tctgcttgtccatcccagac

SEQ ID NO: 2631 - DNA, 20 bp, Sus scrofa
gcccccaaagtgtccagtct

SEQ ID NO: 2632 - DNA, 20 bp, Sus scrofa
agcccccaaagtgtccagtc

SEQ ID NO: 2633 - DNA, 20 bp, Sus scrofa
ccatcccagactggacactt

SEQ ID NO: 2634 - DNA, 20 bp, Sus scrofa
catcccagactggacacttt

SEQ ID NO: 2635 - DNA, 20 bp, Sus scrofa
atcccagactggacactttg

SEQ ID NO: 2636 - DNA, 20 bp, Sus scrofa
tcccagactggacactttgg

SEQ ID NO: 2637 - DNA, 20 bp, Sus scrofa
ctggacactttgggggctga

SEQ ID NO: 2638 - DNA, 20 bp, Sus scrofa
cactttgggggctgaaggca

SEQ ID NO: 2639 - DNA, 20 bp, Sus scrofa
gcgccaggctccaacaataa

SEQ ID NO: 2640 - DNA, 20 bp, Sus scrofa
ggcaaggatacctttattgt

SEQ ID NO: 2641 - DNA, 20 bp, Sus scrofa
atacctttattgttggagcc

SEQ ID NO: 2642 - DNA, 20 bp, Sus scrofa
tgaatgccaggcactgcgcc

SEQ ID NO: 2643 - DNA, 20 bp, Sus scrofa
ttggagcctggcgcagtgcc

SEQ ID NO: 2644 - DNA, 20 bp, Sus scrofa
acttagaacctatgaatgcc

SEQ ID NO: 2645 - DNA, 20 bp, Sus scrofa
gcgcagtgcctggcattcat

SEQ ID NO: 2646 - DNA, 20 bp, Sus scrofa
ttctaagtcatagcattgaa

SEQ ID NO: 2647 - DNA, 20 bp, Sus scrofa
aagtcatagcattgaatgga

SEQ ID NO: 2648 - DNA, 20 bp, Sus scrofa
tcatagcattgaatggacgg

SEQ ID NO: 2649 - DNA, 20 bp, Sus scrofa
gtgagttaacttgtccacat

SEQ ID NO: 2650 - DNA, 20 bp, Sus scrofa
tgctcaccactatacctatg

SEQ ID NO: 2651 - DNA, 20 bp, Sus scrofa
acttgtccacataggtatag

SEQ ID NO: 2652 - DNA, 20 bp, Sus scrofa
gtggtgagcacattagattg

SEQ ID NO: 2653 - DNA, 20 bp, Sus scrofa
acattagattgtggaactcc

SEQ ID NO: 2654 - DNA, 20 bp, Sus scrofa
gggcaacagtcatagagacc

SEQ ID NO: 2655 - DNA, 20 bp, Sus scrofa
ctctatgactgttgcccagc

SEQ ID NO: 2656 - DNA, 20 bp, Sus scrofa
gaccccacttctgacctgct

SEQ ID NO: 2657 - DNA, 20 bp, Sus scrofa
agaccccacttctgacctgc

SEQ ID NO: 2658 - DNA, 20 bp, Sus scrofa
gttgcccagcaggtcagaag

SEQ ID NO: 2659 - DNA, 20 bp, Sus scrofa
ttgcccagcaggtcagaagt

SEQ ID NO: 2660 - DNA, 20 bp, Sus scrofa
tgcccagcaggtcagaagtg

SEQ ID NO: 2661 - DNA, 20 bp, Sus scrofa
ggggtctgattctagctctt

SEQ ID NO: 2662 - DNA, 20 bp, Sus scrofa
ctctttggttgaatgcaaaa

SEQ ID NO: 2663 - DNA, 20 bp, Sus scrofa
atgcaaaatggcatatgtgc

SEQ ID NO: 2664 - DNA, 20 bp, Sus scrofa
atggcatatgtgctggctta

SEQ ID NO: 2665 - DNA, 20 bp, Sus scrofa
gcattgttatagcagaagac

SEQ ID NO: 2666 - DNA, 20 bp, Sus scrofa
cccctgattgatgagtattt

SEQ ID NO: 2667 - DNA, 20 bp, Sus scrofa
gcccctgattgatgagtatt

SEQ ID NO: 2668 - DNA, 20 bp, Sus scrofa
aacccaaatactcatcaatc

SEQ ID NO: 2669 - DNA, 20 bp, Sus scrofa
acccaaatactcatcaatca

SEQ ID NO: 2670 - DNA, 20 bp, Sus scrofa
cccaaatactcatcaatcag

SEQ ID NO: 2671 - DNA, 20 bp, Sus scrofa
caggggctagttaagaaaaa

SEQ ID NO: 2672 - DNA, 20 bp, Sus scrofa
gggctagttaagaaaaatgg

SEQ ID NO: 2673 - DNA, 20 bp, Sus scrofa
ttctaatttgcactgtttca

SEQ ID NO: 2674 - DNA, 20 bp, Sus scrofa
aacagtgcaaattagaaaca

SEQ ID NO: 2675 - DNA, 20 bp, Sus scrofa
gtgcaaattagaaacaagga

SEQ ID NO: 2676 - DNA, 20 bp, Sus scrofa
cacaaacttcatgaaaaaaa

SEQ ID NO: 2677 - DNA, 20 bp, Sus scrofa
caatatataatatactaatt

SEQ ID NO: 2678 - DNA, 20 bp, Sus scrofa
aatatataatatactaattt

SEQ ID NO: 2679 - DNA, 20 bp, Sus scrofa
gtgtatgtgtaaacaaactc

SEQ ID NO: 2680 - DNA, 20 bp, Sus scrofa
tgtatgtgtaaacaaactct

SEQ ID NO: 2681 - DNA, 20 bp, Sus scrofa
atgtgtaaacaaactctggg

SEQ ID NO: 2682 - DNA, 20 bp, Sus scrofa
aactctgggaggatttttaa

SEQ ID NO: 2683 - DNA, 20 bp, Sus scrofa
actctgggaggatttttaat

SEQ ID NO: 2684 - DNA, 20 bp, Sus scrofa
ctgggaggatttttaatggg

SEQ ID NO: 2685 - DNA, 20 bp, Sus scrofa
tgggaggatttttaatgggt

SEQ ID NO: 2686 - DNA, 20 bp, Sus scrofa
taatgggtgggatagttaac

SEQ ID NO: 2687 - DNA, 20 bp, Sus scrofa
ggtgggatagttaactggat

SEQ ID NO: 2688 - DNA, 20 bp, Sus scrofa
gtgggatagttaactggata

SEQ ID NO: 2689 - DNA, 20 bp, Sus scrofa
ggatagttaactggataggg

SEQ ID NO: 2690 - DNA, 20 bp, Sus scrofa
gatagttaactggatagggt

SEQ ID NO: 2691 - DNA, 20 bp, Sus scrofa
gtatgttttcttaagttttt

SEQ ID NO: 2692 - DNA, 20 bp, Sus scrofa
aagcaatacagtcattctca

SEQ ID NO: 2693 - DNA, 20 bp, Sus scrofa
agttaaaaagataaaaataa

SEQ ID NO: 2694 - DNA, 20 bp, Sus scrofa
taaaaagataaaaataatgg

SEQ ID NO: 2695 - DNA, 20 bp, Sus scrofa
aaaaataatggaggtgacct

SEQ ID NO: 2696 - DNA, 20 bp, Sus scrofa
tacagagaatagctagtcca

SEQ ID NO: 2697 - DNA, 20 bp, Sus scrofa
gactagctattctctgtatc

SEQ ID NO: 2698 - DNA, 20 bp, Sus scrofa
actagctattctctgtatct

SEQ ID NO: 2699 - DNA, 20 bp, Sus scrofa
tctctgtatctgggcttcag

SEQ ID NO: 2700 - DNA, 20 bp, Sus scrofa
gggcttcagtggattagatc

SEQ ID NO: 2701 - DNA, 20 bp, Sus scrofa
gattagatcaggccttcatc

SEQ ID NO: 2702 - DNA, 20 bp, Sus scrofa
caacatgccactccagatga

SEQ ID NO: 2703 - DNA, 20 bp, Sus scrofa
gatcaggccttcatctggag

SEQ ID NO: 2704 - DNA, 20 bp, Sus scrofa
ttgtgtatattgtgtctctc

SEQ ID NO: 2705 - DNA, 20 bp, Sus scrofa
ctggctttcatgagctcttc

SEQ ID NO: 2706 - DNA, 20 bp, Sus scrofa
aggacaggggcagcagcttc

SEQ ID NO: 2707 - DNA, 20 bp, Sus scrofa
tacagaccatcctaggacag

SEQ ID NO: 2708 - DNA, 20 bp, Sus scrofa
gaagctgctgcccctgtcct

SEQ ID NO: 2709 - DNA, 20 bp, Sus scrofa
ctacagaccatcctaggaca

SEQ ID NO: 2710 - DNA, 20 bp, Sus scrofa
actacagaccatcctaggac

SEQ ID NO: 2711 - DNA, 20 bp, Sus scrofa
ctgctgcccctgtcctagga

SEQ ID NO: 2712 - DNA, 20 bp, Sus scrofa
aagggactacagaccatcct

SEQ ID NO: 2713 - DNA, 20 bp, Sus scrofa
gcaggccaccaatggaagaa

SEQ ID NO: 2714 - DNA, 20 bp, Sus scrofa
tgcaggccaccaatggaaga

SEQ ID NO: 2715 - DNA, 20 bp, Sus scrofa
tctgtagtcccttcttccat

SEQ ID NO: 2716 - DNA, 20 bp, Sus scrofa
gtagtcccttcttccattgg

SEQ ID NO: 2717 - DNA, 20 bp, Sus scrofa
attcaggtgcaggccaccaa

SEQ ID NO: 2718 - DNA, 20 bp, Sus scrofa
tgagctgatgattcaggtgc

SEQ ID NO: 2719 - DNA, 20 bp, Sus scrofa
acactctgagctgatgattc

SEQ ID NO: 2720 - DNA, 20 bp, Sus scrofa
tcagagtgtttgagaaagac

SEQ ID NO: 2721 - DNA, 20 bp, Sus scrofa
cagagtgtttgagaaagact

SEQ ID NO: 2722 - DNA, 20 bp, Sus scrofa
agagtgtttgagaaagactg

SEQ ID NO: 2723 - DNA, 20 bp, Sus scrofa
cagaaggcctctggctctct

SEQ ID NO: 2724 - DNA, 20 bp, Sus scrofa
gcagaaggcctctggctctc

SEQ ID NO: 2725 - DNA, 20 bp, Sus scrofa
ggggtgacccagagagccag

SEQ ID NO: 2726 - DNA, 20 bp, Sus scrofa
acacctctgcagaaggcctc

SEQ ID NO: 2727 - DNA, 20 bp, Sus scrofa
aggcctgacacctctgcaga

SEQ ID NO: 2728 - DNA, 20 bp, Sus scrofa
gagccagaggccttctgcag

SEQ ID NO: 2729 - DNA, 20 bp, Sus scrofa
aggccttctgcagaggtgtc

SEQ ID NO: 2730 - DNA, 20 bp, Sus scrofa
caggcctggagacaggaaca

SEQ ID NO: 2731 - DNA, 20 bp, Sus scrofa
caggccttgttcctgtctcc

SEQ ID NO: 2732 - DNA, 20 bp, Sus scrofa
aaagtcccaggcctggagac

SEQ ID NO: 2733 - DNA, 20 bp, Sus scrofa
cttgttcctgtctccaggcc

SEQ ID NO: 2734 - DNA, 20 bp, Sus scrofa
ttgttcctgtctccaggcct

SEQ ID NO: 2735 - DNA, 20 bp, Sus scrofa
agaggataaagtcccaggcc

SEQ ID NO: 2736 - DNA, 20 bp, Sus scrofa
tgttcagaggataaagtccc

SEQ ID NO: 2737 - DNA, 20 bp, Sus scrofa
catcagggcagggtgttcag

SEQ ID NO: 2738 - DNA, 20 bp, Sus scrofa
acctgagtcacatcagggca

SEQ ID NO: 2739 - DNA, 20 bp, Sus scrofa
cacctgagtcacatcagggc

SEQ ID NO: 2740 - DNA, 20 bp, Sus scrofa
gaaccacctgagtcacatca

SEQ ID NO: 2741 - DNA, 20 bp, Sus scrofa
agaaccacctgagtcacatc

SEQ ID NO: 2742 - DNA, 20 bp, Sus scrofa
accctgccctgatgtgactc

SEQ ID NO: 2743 - DNA, 20 bp, Sus scrofa
ctgccctgatgtgactcagg

SEQ ID NO: 2744 - DNA, 20 bp, Sus scrofa
tctgtaatccttcactttag

SEQ ID NO: 2745 - DNA, 20 bp, Sus scrofa
ctctgtaatccttcacttta

SEQ ID NO: 2746 - DNA, 20 bp, Sus scrofa
tctctgtaatccttcacttt

SEQ ID NO: 2747 - DNA, 20 bp, Sus scrofa
tggttcttcccctaaagtga

SEQ ID NO: 2748 - DNA, 20 bp, Sus scrofa
aaggattacagagactgttc

SEQ ID NO: 2749 - DNA, 20 bp, Sus scrofa
gagactgttctggagcattc

SEQ ID NO: 2750 - DNA, 20 bp, Sus scrofa
caaagtgtgctgcagtttaa

SEQ ID NO: 2751 - DNA, 20 bp, Sus scrofa
aaagtgtgctgcagtttaat

SEQ ID NO: 2752 - DNA, 20 bp, Sus scrofa
gtttaatgggaagaaagaaa

SEQ ID NO: 2753 - DNA, 20 bp, Sus scrofa
aaatggcagaatgttttccc

SEQ ID NO: 2754 - DNA, 20 bp, Sus scrofa
aaaagcattaaaaataacct

SEQ ID NO: 2755 - DNA, 20 bp, Sus scrofa
gaaaagcattaaaaataacc

SEQ ID NO: 2756 - DNA, 20 bp, Sus scrofa
tttactgcgaactaagtgca

SEQ ID NO: 2757 - DNA, 20 bp, Sus scrofa
gaactaagtgcaaggcagtg

SEQ ID NO: 2758 - DNA, 20 bp, Sus scrofa
aactaagtgcaaggcagtgt

SEQ ID NO: 2759 - DNA, 20 bp, Sus scrofa
actaagtgcaaggcagtgtg

SEQ ID NO: 2760 - DNA, 20 bp, Sus scrofa
ctaagtgcaaggcagtgtgg

SEQ ID NO: 2761 - DNA, 20 bp, Sus scrofa
ggcgccccagagagcagagg

SEQ ID NO: 2762 - DNA, 20 bp, Sus scrofa
cttggcgccccagagagcag

SEQ ID NO: 2763 - DNA, 20 bp, Sus scrofa
ataacacctcctctgctctc

SEQ ID NO: 2764 - DNA, 20 bp, Sus scrofa
taacacctcctctgctctct

SEQ ID NO: 2765 - DNA, 20 bp, Sus scrofa
aacacctcctctgctctctg

SEQ ID NO: 2766 - DNA, 20 bp, Sus scrofa
ctctctggggcgccaagttt

SEQ ID NO: 2767 - DNA, 20 bp, Sus scrofa
tctctggggcgccaagtttc

SEQ ID NO: 2768 - DNA, 20 bp, Sus scrofa
caagtttcttacccgaaact

SEQ ID NO: 2769 - DNA, 20 bp, Sus scrofa
ctgtcctggagggcacaggg

SEQ ID NO: 2770 - DNA, 20 bp, Sus scrofa
gtgctgtcctggagggcaca

SEQ ID NO: 2771 - DNA, 20 bp, Sus scrofa
cgtgctgtcctggagggcac

SEQ ID NO: 2772 - DNA, 20 bp, Sus scrofa
aattcctccctgtgccctcc

SEQ ID NO: 2773 - DNA, 20 bp, Sus scrofa
gcaaaccgtgctgtcctgga

SEQ ID NO: 2774 - DNA, 20 bp, Sus scrofa
ggcaaaccgtgctgtcctgg

SEQ ID NO: 2775 - DNA, 20 bp, Sus scrofa
agaggcaaaccgtgctgtcc

SEQ ID NO: 2776 - DNA, 20 bp, Sus scrofa
ctgtgccctccaggacagca

SEQ ID NO: 2777 - DNA, 20 bp, Sus scrofa
acaaaactctgcgggactag

SEQ ID NO: 2778 - DNA, 20 bp, Sus scrofa
ccaatcccacaaaactctgc

SEQ ID NO: 2779 - DNA, 20 bp, Sus scrofa
accaatcccacaaaactctg

SEQ ID NO: 2780 - DNA, 20 bp, Sus scrofa
tctagtcccgcagagttttg

SEQ ID NO: 2781 - DNA, 20 bp, Sus scrofa
ctagtcccgcagagttttgt

SEQ ID NO: 2782 - DNA, 20 bp, Sus scrofa
cccgcagagttttgtgggat

SEQ ID NO: 2783 - DNA, 20 bp, Sus scrofa
cagagttttgtgggattggt

SEQ ID NO: 2784 - DNA, 20 bp, Sus scrofa
tcatctgtaaaatggggaga

SEQ ID NO: 2785 - DNA, 20 bp, Sus scrofa
ctttcctcatctgtaaaatg

SEQ ID NO: 2786 - DNA, 20 bp, Sus scrofa
actttcctcatctgtaaaat

SEQ ID NO: 2787 - DNA, 20 bp, Sus scrofa
tactttcctcatctgtaaaa

SEQ ID NO: 2788 - DNA, 20 bp, Sus scrofa
ttctccccattttacagatg

SEQ ID NO: 2789 - DNA, 20 bp, Sus scrofa
cacttaggaactgcagcttt

SEQ ID NO: 2790 - DNA, 20 bp, Sus scrofa
acacttaggaactgcagctt

SEQ ID NO: 2791 - DNA, 20 bp, Sus scrofa
ggttccaggttttaacactt

SEQ ID NO: 2792 - DNA, 20 bp, Sus scrofa
agttcctaagtgttaaaacc

SEQ ID NO: 2793 - DNA, 20 bp, Sus scrofa
tgtctttttttgtcggttcc

SEQ ID NO: 2794 - DNA, 20 bp, Sus scrofa
ttgtgtgtgtctttttttgt

SEQ ID NO: 2795 - DNA, 20 bp, Sus scrofa
aagacacacacaaaaaaacc

SEQ ID NO: 2796 - DNA, 20 bp, Sus scrofa
agaaagtgtggtttggttcc

SEQ ID NO: 2797 - DNA, 20 bp, Sus scrofa
caccatcagaaagtgtggtt

SEQ ID NO: 2798 - DNA, 20 bp, Sus scrofa
cgagacaccatcagaaagtg

SEQ ID NO: 2799 - DNA, 20 bp, Sus scrofa
aaccaaaccacactttctga

SEQ ID NO: 2800 - DNA, 20 bp, Sus scrofa
agttttactcatgggtgtct

SEQ ID NO: 2801 - DNA, 20 bp, Sus scrofa
aagttttactcatgggtgtc

SEQ ID NO: 2802 - DNA, 20 bp, Sus scrofa
tggcagaaagttttactcat

SEQ ID NO: 2803 - DNA, 20 bp, Sus scrofa
ttggcagaaagttttactca

SEQ ID NO: 2804 - DNA, 20 bp, Sus scrofa
tgagtaaaactttctgccaa

SEQ ID NO: 2805 - DNA, 20 bp, Sus scrofa
cacccctggggaatatcctt

SEQ ID NO: 2806 - DNA, 20 bp, Sus scrofa
tctgccaaaggatattcccc

SEQ ID NO: 2807 - DNA, 20 bp, Sus scrofa
ctgccaaaggatattcccca

SEQ ID NO: 2808 - DNA, 20 bp, Sus scrofa
tgccaaaggatattccccag

SEQ ID NO: 2809 - DNA, 20 bp, Sus scrofa
aggccttgcctgcacccctg

SEQ ID NO: 2810 - DNA, 20 bp, Sus scrofa
caggccttgcctgcacccct

SEQ ID NO: 2811 - DNA, 20 bp, Sus scrofa
acaggccttgcctgcacccc

SEQ ID NO: 2812 - DNA, 20 bp, Sus scrofa
aggatattccccaggggtgc

SEQ ID NO: 2813 - DNA, 20 bp, Sus scrofa
attccccaggggtgcaggca

SEQ ID NO: 2814 - DNA, 20 bp, Sus scrofa
caatgtttccaggtagaaac

SEQ ID NO: 2815 - DNA, 20 bp, Sus scrofa
aggcaaggcctgtttctacc

SEQ ID NO: 2816 - DNA, 20 bp, Sus scrofa
tgtgctcacccaatgtttcc

SEQ ID NO: 2817 - DNA, 20 bp, Sus scrofa
ctgtttctacctggaaacat

SEQ ID NO: 2818 - DNA, 20 bp, Sus scrofa
tgtttctacctggaaacatt

SEQ ID NO: 2819 - DNA, 20 bp, Sus scrofa
ggaaaaaaggagctttattc

SEQ ID NO: 2820 - DNA, 20 bp, Sus scrofa
gcccttccttaaaggaaaaa

SEQ ID NO: 2821 - DNA, 20 bp, Sus scrofa
aaagctccttttttccttta

SEQ ID NO: 2822 - DNA, 20 bp, Sus scrofa
tttctcttgcccttccttaa

SEQ ID NO: 2823 - DNA, 20 bp, Sus scrofa
ctccttttttcctttaagga

SEQ ID NO: 2824 - DNA, 20 bp, Sus scrofa
tccttttttcctttaaggaa

SEQ ID NO: 2825 - DNA, 20 bp, Sus scrofa
ggaagggcaagagaaatcac

SEQ ID NO: 2826 - DNA, 20 bp, Sus scrofa
agaaatcacaggcttatgcc

SEQ ID NO: 2827 - DNA, 20 bp, Sus scrofa
gaaatcacaggcttatgcct

SEQ ID NO: 2828 - DNA, 20 bp, Sus scrofa
acaggcttatgcctgggtct

SEQ ID NO: 2829 - DNA, 20 bp, Sus scrofa
ggggttcagatccaagaccc

SEQ ID NO: 2830 - DNA, 20 bp, Sus scrofa
ctgtttggaccacagcaaag

SEQ ID NO: 2831 - DNA, 20 bp, Sus scrofa
actgtttggaccacagcaaa

SEQ ID NO: 2832 - DNA, 20 bp, Sus scrofa
ggatctgaacccctttgctg

SEQ ID NO: 2833 - DNA, 20 bp, Sus scrofa
aactgtttggaccacagcaa

SEQ ID NO: 2834 - DNA, 20 bp, Sus scrofa
cagtggaagtcagaactgtt

SEQ ID NO: 2835 - DNA, 20 bp, Sus scrofa
gtgatgggcttcacaagcag

SEQ ID NO: 2836 - DNA, 20 bp, Sus scrofa
gtacctggtgccagagtgat

SEQ ID NO: 2837 - DNA, 20 bp, Sus scrofa
gcttgtgaagcccatcactc

SEQ ID NO: 2838 - DNA, 20 bp, Sus scrofa
tgtacctggtgccagagtga

SEQ ID NO: 2839 - DNA, 20 bp, Sus scrofa
aagcccatcactctggcacc

SEQ ID NO: 2840 - DNA, 20 bp, Sus scrofa
atgttctagaatcatgtacc

SEQ ID NO: 2841 - DNA, 20 bp, Sus scrofa
atgattctagaacatcccat

SEQ ID NO: 2842 - DNA, 20 bp, Sus scrofa
acgcacttgtacacacctat

SEQ ID NO: 2843 - DNA, 20 bp, Sus scrofa
cacgcacttgtacacaccta

SEQ ID NO: 2844 - DNA, 20 bp, Sus scrofa
caagtgcgtgtgacagacag

SEQ ID NO: 2845 - DNA, 20 bp, Sus scrofa
aagtgcgtgtgacagacagt

SEQ ID NO: 2846 - DNA, 20 bp, Sus scrofa
gataatgtgagaatgagatg

SEQ ID NO: 2847 - DNA, 20 bp, Sus scrofa
tgataatgtgagaatgagat

SEQ ID NO: 2848 - DNA, 20 bp, Sus scrofa
gtgataatgtgagaatgaga

SEQ ID NO: 2849 - DNA, 20 bp, Sus scrofa
gacggaatttgtggaaggga

SEQ ID NO: 2850 - DNA, 20 bp, Sus scrofa
tggtgacggaatttgtggaa

SEQ ID NO: 2851 - DNA, 20 bp, Sus scrofa
ctggtgacggaatttgtgga

SEQ ID NO: 2852 - DNA, 20 bp, Sus scrofa
ggtactggtgacggaatttg

SEQ ID NO: 2853 - DNA, 20 bp, Sus scrofa
aggacgatgggtactggtga

SEQ ID NO: 2854 - DNA, 20 bp, Sus scrofa
tcagccaggacgatgggtac

SEQ ID NO: 2855 - DNA, 20 bp, Sus scrofa
tggggatcagccaggacgat

SEQ ID NO: 2856 - DNA, 20 bp, Sus scrofa
gtcaccagtacccatcgtcc

SEQ ID NO: 2857 - DNA, 20 bp, Sus scrofa
ttggggatcagccaggacga

SEQ ID NO: 2858 - DNA, 20 bp, Sus scrofa
ggtccttttggggatcagcc

SEQ ID NO: 2859 - DNA, 20 bp, Sus scrofa
cgtcctggctgatccccaaa

SEQ ID NO: 2860 - DNA, 20 bp, Sus scrofa
cagcatgcttggtccttttg

SEQ ID NO: 2861 - DNA, 20 bp, Sus scrofa
gcagcatgcttggtcctttt

SEQ ID NO: 2862 - DNA, 20 bp, Sus scrofa
ggcagcatgcttggtccttt

SEQ ID NO: 2863 - DNA, 20 bp, Sus scrofa
ccctgagcaggcagcatgct

SEQ ID NO: 2864 - DNA, 20 bp, Sus scrofa
accaagcatgctgcctgctc

SEQ ID NO: 2865 - DNA, 20 bp, Sus scrofa
ccaagcatgctgcctgctca

SEQ ID NO: 2866 - DNA, 20 bp, Sus scrofa
cgagggcaaagaccctgagc

SEQ ID NO: 2867 - DNA, 20 bp, Sus scrofa
ctgctcagggtctttgccct

SEQ ID NO: 2868 - DNA, 20 bp, Sus scrofa
gagggcagagggaacaccga

SEQ ID NO: 2869 - DNA, 20 bp, Sus scrofa
agagggcagagggaacaccg

SEQ ID NO: 2870 - DNA, 20 bp, Sus scrofa
agccaagtgaagagggcaga

SEQ ID NO: 2871 - DNA, 20 bp, Sus scrofa
aagccaagtgaagagggcag

SEQ ID NO: 2872 - DNA, 20 bp, Sus scrofa
gacttgaagccaagtgaaga

SEQ ID NO: 2873 - DNA, 20 bp, Sus scrofa
ggacttgaagccaagtgaag

SEQ ID NO: 2874 - DNA, 20 bp, Sus scrofa
ttccctctgccctcttcact

SEQ ID NO: 2875 - DNA, 20 bp, Sus scrofa
tctaagctgagctttcagtg

SEQ ID NO: 2876 - DNA, 20 bp, Sus scrofa
actgaaagctcagcttagaa

SEQ ID NO: 2877 - DNA, 20 bp, Sus scrofa
agcttagaaaggccttcccc

SEQ ID NO: 2878 - DNA, 20 bp, Sus scrofa
ttcacaaaagatcctgggga

SEQ ID NO: 2879 - DNA, 20 bp, Sus scrofa
gtacttcacaaaagatcctg

SEQ ID NO: 2880 - DNA, 20 bp, Sus scrofa
agtacttcacaaaagatcct

SEQ ID NO: 2881 - DNA, 20 bp, Sus scrofa
cagtacttcacaaaagatcc

SEQ ID NO: 2882 - DNA, 20 bp, Sus scrofa
aatgcaacaaagggacagag

SEQ ID NO: 2883 - DNA, 20 bp, Sus scrofa
aaatgcaacaaagggacaga

SEQ ID NO: 2884 - DNA, 20 bp, Sus scrofa
taaatgcaacaaagggacag

SEQ ID NO: 2885 - DNA, 20 bp, Sus scrofa
atacatataaatgcaacaaa

SEQ ID NO: 2886 - DNA, 20 bp, Sus scrofa
gatacatataaatgcaacaa

SEQ ID NO: 2887 - DNA, 20 bp, Sus scrofa
acatagatatctatacttac

SEQ ID NO: 2888 - DNA, 20 bp, Sus scrofa
cgtgggtttacaatctagtg

SEQ ID NO: 2889 - DNA, 20 bp, Sus scrofa
ccgtgggtttacaatctagt

SEQ ID NO: 2890 - DNA, 20 bp, Sus scrofa
cccgtgggtttacaatctag

SEQ ID NO: 2891 - DNA, 20 bp, Sus scrofa
cccactagattgtaaaccca

SEQ ID NO: 2892 - DNA, 20 bp, Sus scrofa
ccactagattgtaaacccac

SEQ ID NO: 2893 - DNA, 20 bp, Sus scrofa
aaaacaggcacctaacccgt

SEQ ID NO: 2894 - DNA, 20 bp, Sus scrofa
agattgtaaacccacgggtt

SEQ ID NO: 2895 - DNA, 20 bp, Sus scrofa
aaaaacaggcacctaacccg

SEQ ID NO: 2896 - DNA, 20 bp, Sus scrofa
aaacagcaatgaacaaaaac

SEQ ID NO: 2897 - DNA, 20 bp, Sus scrofa
ctgtttctgtttcctagcac

SEQ ID NO: 2898 - DNA, 20 bp, Sus scrofa
aaaagctgggcacctgtgct

SEQ ID NO: 2899 - DNA, 20 bp, Sus scrofa
cagagtatctgtcaaaagct

SEQ ID NO: 2900 - DNA, 20 bp, Sus scrofa
acagagtatctgtcaaaagc

SEQ ID NO: 2901 - DNA, 20 bp, Sus scrofa
cattgttgaatgaataaatc

SEQ ID NO: 2902 - DNA, 20 bp, Sus scrofa
gaatgaataaatcaggcctg

SEQ ID NO: 2903 - DNA, 20 bp, Sus scrofa
gcattatgtgtttaggccac

SEQ ID NO: 2904 - DNA, 20 bp, Sus scrofa
taaagaagcattatgtgttt

SEQ ID NO: 2905 - DNA, 20 bp, Sus scrofa
cacataatgcttctttaaag

SEQ ID NO: 2906 - DNA, 20 bp, Sus scrofa
acataatgcttctttaaaga

SEQ ID NO: 2907 - DNA, 20 bp, Sus scrofa
tcaaatcatagcattttaag

SEQ ID NO: 2908 - DNA, 20 bp, Sus scrofa
aatcatagcattttaagagg

SEQ ID NO: 2909 - DNA, 20 bp, Sus scrofa
ttaagaggaggaaagatcca

SEQ ID NO: 2910 - DNA, 20 bp, Sus scrofa
ccctgcaaagagatgagcct

SEQ ID NO: 2911 - DNA, 20 bp, Sus scrofa
tccaaggctcatctctttgc

SEQ ID NO: 2912 - DNA, 20 bp, Sus scrofa
ccaaggctcatctctttgca

SEQ ID NO: 2913 - DNA, 20 bp, Sus scrofa
attgttcagtactgttcatg

SEQ ID NO: 2914 - DNA, 20 bp, Sus scrofa
cctgtaagtgtatgcatcag

SEQ ID NO: 2915 - DNA, 20 bp, Sus scrofa
cctctgatgcatacacttac

SEQ ID NO: 2916 - DNA, 20 bp, Sus scrofa
ctctgatgcatacacttaca

SEQ ID NO: 2917 - DNA, 20 bp, Sus scrofa
atgcatacacttacagggac

SEQ ID NO: 2918 - DNA, 20 bp, Sus scrofa
tgcatacacttacagggaca

SEQ ID NO: 2919 - DNA, 20 bp, Sus scrofa
gcatacacttacagggacag

SEQ ID NO: 2920 - DNA, 20 bp, Sus scrofa
tgtcagagcagcccattctt

SEQ ID NO: 2921 - DNA, 20 bp, Sus scrofa
agcttgtcccaccaaagaat

SEQ ID NO: 2922 - DNA, 20 bp, Sus scrofa
cagcttgtcccaccaaagaa

SEQ ID NO: 2923 - DNA, 20 bp, Sus scrofa
cagagcagcccattctttgg

SEQ ID NO: 2924 - DNA, 20 bp, Sus scrofa
agagcagcccattctttggt

SEQ ID NO: 2925 - DNA, 20 bp, Sus scrofa
gaccaacataaaacataaga

SEQ ID NO: 2926 - DNA, 20 bp, Sus scrofa
ggaccaacataaaacataag

SEQ ID NO: 2927 - DNA, 20 bp, Sus scrofa
caccctcttatgttttatgt

SEQ ID NO: 2928 - DNA, 20 bp, Sus scrofa
aattacaaataggcagtttt

SEQ ID NO: 2929 - DNA, 20 bp, Sus scrofa
agtgtgcaggaattacaaat

SEQ ID NO: 2930 - DNA, 20 bp, Sus scrofa
aagagctaaggtcagtgtgc

SEQ ID NO: 2931 - DNA, 20 bp, Sus scrofa
ctccagcagctcaagagcta

SEQ ID NO: 2932 - DNA, 20 bp, Sus scrofa
gaccttagctcttgagctgc

SEQ ID NO: 2933 - DNA, 20 bp, Sus scrofa
atctttctccgactattgga

SEQ ID NO: 2934 - DNA, 20 bp, Sus scrofa
acagctctccttccaatagt

SEQ ID NO: 2935 - DNA, 20 bp, Sus scrofa
agctatctttctccgactat

SEQ ID NO: 2936 - DNA, 20 bp, Sus scrofa
atgtttaggctggagggtgg

SEQ ID NO: 2937 - DNA, 20 bp, Sus scrofa
gatgtttaggctggagggtg

SEQ ID NO: 2938 - DNA, 20 bp, Sus scrofa
tgatgtttaggctggagggt

SEQ ID NO: 2939 - DNA, 20 bp, Sus scrofa
gtgatgtttaggctggaggg

SEQ ID NO: 2940 - DNA, 20 bp, Sus scrofa
ctagtgatgtttaggctgga

SEQ ID NO: 2941 - DNA, 20 bp, Sus scrofa
actagtgatgtttaggctgg

SEQ ID NO: 2942 - DNA, 20 bp, Sus scrofa
ggaactagtgatgtttaggc

SEQ ID NO: 2943 - DNA, 20 bp, Sus scrofa
ggaaggaactagtgatgttt

SEQ ID NO: 2944 - DNA, 20 bp, Sus scrofa
aacactggaagaacaatgga

SEQ ID NO: 2945 - DNA, 20 bp, Sus scrofa
ccgtaacactggaagaacaa

SEQ ID NO: 2946 - DNA, 20 bp, Sus scrofa
ccattgttcttccagtgtta

SEQ ID NO: 2947 - DNA, 20 bp, Sus scrofa
gcatctgcaaaccgtaacac

SEQ ID NO: 2948 - DNA, 20 bp, Sus scrofa
ggcaggcaccaagggtagga

SEQ ID NO: 2949 - DNA, 20 bp, Sus scrofa
tgcagatgccttcctaccct

SEQ ID NO: 2950 - DNA, 20 bp, Sus scrofa
ttgaggcaggcaccaagggt

SEQ ID NO: 2951 - DNA, 20 bp, Sus scrofa
aaacttgaggcaggcaccaa

SEQ ID NO: 2952 - DNA, 20 bp, Sus scrofa
caaacttgaggcaggcacca

SEQ ID NO: 2953 - DNA, 20 bp, Sus scrofa
aagcagaacaaacttgaggc

SEQ ID NO: 2954 - DNA, 20 bp, Sus scrofa
cccgaagcagaacaaacttg

SEQ ID NO: 2955 - DNA, 20 bp, Sus scrofa
gcctcaagtttgttctgctt

SEQ ID NO: 2956 - DNA, 20 bp, Sus scrofa
cctcaagtttgttctgcttc

SEQ ID NO: 2957 - DNA, 20 bp, Sus scrofa
gcttcgggtgtcagaattta

SEQ ID NO: 2958 - DNA, 20 bp, Sus scrofa
gggtgtcagaatttaaggtc

SEQ ID NO: 2959 - DNA, 20 bp, Sus scrofa
tcccaaaacactgttctgat

SEQ ID NO: 2960 - DNA, 20 bp, Sus scrofa
gtcccaaaacactgttctga

SEQ ID NO: 2961 - DNA, 20 bp, Sus scrofa
gacccatcagaacagtgttt

SEQ ID NO: 2962 - DNA, 20 bp, Sus scrofa
acccatcagaacagtgtttt

SEQ ID NO: 2963 - DNA, 20 bp, Sus scrofa
gtgttttgggaccctgaccg

SEQ ID NO: 2964 - DNA, 20 bp, Sus scrofa
ggaccaagcgtcctcggtca

SEQ ID NO: 2965 - DNA, 20 bp, Sus scrofa
tggaccaagcgtcctcggtc

SEQ ID NO: 2966 - DNA, 20 bp, Sus scrofa
tgagatggaccaagcgtcct

SEQ ID NO: 2967 - DNA, 20 bp, Sus scrofa
ggaccctgaccgaggacgct

SEQ ID NO: 2968 - DNA, 20 bp, Sus scrofa
gtggacagaaacaagtgaga

SEQ ID NO: 2969 - DNA, 20 bp, Sus scrofa
gatggccaacacaggctgtg

SEQ ID NO: 2970 - DNA, 20 bp, Sus scrofa
tctgtccacacagcctgtgt

SEQ ID NO: 2971 - DNA, 20 bp, Sus scrofa
cctgccaagatggccaacac

SEQ ID NO: 2972 - DNA, 20 bp, Sus scrofa
acagcctgtgttggccatct

SEQ ID NO: 2973 - DNA, 20 bp, Sus scrofa
gaaggagatccctgccaaga

SEQ ID NO: 2974 - DNA, 20 bp, Sus scrofa
cctgtgttggccatcttggc

SEQ ID NO: 2975 - DNA, 20 bp, Sus scrofa
ctgtgttggccatcttggca

SEQ ID NO: 2976 - DNA, 20 bp, Sus scrofa
ccttcatcaaaagctcatga

SEQ ID NO: 2977 - DNA, 20 bp, Sus scrofa
ccttcatgagcttttgatga

SEQ ID NO: 2978 - DNA, 20 bp, Sus scrofa
gaaggctaactaaaatctct

SEQ ID NO: 2979 - DNA, 20 bp, Sus scrofa
attcttgctgagtcagggag

SEQ ID NO: 2980 - DNA, 20 bp, Sus scrofa
gattcttgctgagtcaggga

SEQ ID NO: 2981 - DNA, 20 bp, Sus scrofa
cgattcttgctgagtcaggg

SEQ ID NO: 2982 - DNA, 20 bp, Sus scrofa
ttacgattcttgctgagtca

SEQ ID NO: 2983 - DNA, 20 bp, Sus scrofa
tttacgattcttgctgagtc

SEQ ID NO: 2984 - DNA, 20 bp, Sus scrofa
tgactcagcaagaatcgtaa

SEQ ID NO: 2985 - DNA, 20 bp, Sus scrofa
cagcaagaatcgtaaaggtt

SEQ ID NO: 2986 - DNA, 20 bp, Sus scrofa
agcaagaatcgtaaaggttt

SEQ ID NO: 2987 - DNA, 20 bp, Sus scrofa
gcaagaatcgtaaaggtttg

SEQ ID NO: 2988 - DNA, 20 bp, Sus scrofa
caagaatcgtaaaggtttgg

SEQ ID NO: 2989 - DNA, 20 bp, Sus scrofa
tggtttgtgaaatcgagcac

SEQ ID NO: 2990 - DNA, 20 bp, Sus scrofa
ctggtttgtgaaatcgagca

SEQ ID NO: 2991 - DNA, 20 bp, Sus scrofa
agaactttacctatatttac

SEQ ID NO: 2992 - DNA, 20 bp, Sus scrofa
tttcacaaaccagtaaatat

SEQ ID NO: 2993 - DNA, 20 bp, Sus scrofa
taaagttctctcaccaactc

SEQ ID NO: 2994 - DNA, 20 bp, Sus scrofa
tttttctgtacttccagagt

SEQ ID NO: 2995 - DNA, 20 bp, Sus scrofa
aagaaagttagaggctcagt

SEQ ID NO: 2996 - DNA, 20 bp, Sus scrofa
caagaaagttagaggctcag

SEQ ID NO: 2997 - DNA, 20 bp, Sus scrofa
ggcagaagcaagaaagttag

SEQ ID NO: 2998 - DNA, 20 bp, Sus scrofa
ggacacaggcatcaaaaaga

SEQ ID NO: 2999 - DNA, 20 bp, Sus scrofa
aggacacaggcatcaaaaag

SEQ ID NO: 3000 - DNA, 20 bp, Sus scrofa
agactctgtgaaaaggacac

SEQ ID NO: 3001 - DNA, 20 bp, Sus scrofa
tacagaaagactctgtgaaa

SEQ ID NO: 3002 - DNA, 20 bp, Sus scrofa
ttctgtagcttactctccct

SEQ ID NO: 3003 - DNA, 20 bp, Sus scrofa
ggagagggacggaacaccga

SEQ ID NO: 3004 - DNA, 20 bp, Sus scrofa
gggagagggacggaacaccg

SEQ ID NO: 3005 - DNA, 20 bp, Sus scrofa
aaggaaggaggggagaggga

SEQ ID NO: 3006 - DNA, 20 bp, Sus scrofa
caggaaggaaggaggggaga

SEQ ID NO: 3007 - DNA, 20 bp, Sus scrofa
ccaggaaggaaggaggggag

SEQ ID NO: 3008 - DNA, 20 bp, Sus scrofa
gagagccaggaaggaaggag

SEQ ID NO: 3009 - DNA, 20 bp, Sus scrofa
tgagagccaggaaggaagga

SEQ ID NO: 3010 - DNA, 20 bp, Sus scrofa
atgagagccaggaaggaagg

SEQ ID NO: 3011 - DNA, 20 bp, Sus scrofa
ggaatgagagccaggaagga

SEQ ID NO: 3012 - DNA, 20 bp, Sus scrofa
cctctcccctccttccttcc

SEQ ID NO: 3013 - DNA, 20 bp, Sus scrofa
caatggaatgagagccagga

SEQ ID NO: 3014 - DNA, 20 bp, Sus scrofa
ggggcaatggaatgagagcc

SEQ ID NO: 3015 - DNA, 20 bp, Sus scrofa
ggaagggagaaacggggcaa

SEQ ID NO: 3016 - DNA, 20 bp, Sus scrofa
ctaactggaagggagaaacg

SEQ ID NO: 3017 - DNA, 20 bp, Sus scrofa
actaactggaagggagaaac

SEQ ID NO: 3018 - DNA, 20 bp, Sus scrofa
tactaactggaagggagaaa

SEQ ID NO: 3019 - DNA, 20 bp, Sus scrofa
ccatacactactaactggaa

SEQ ID NO: 3020 - DNA, 20 bp, Sus scrofa
tccatacactactaactgga

SEQ ID NO: 3021 - DNA, 20 bp, Sus scrofa
taattccatacactactaac

SEQ ID NO: 3022 - DNA, 20 bp, Sus scrofa
cccttccagttagtagtgta

SEQ ID NO: 3023 - DNA, 20 bp, Sus scrofa
tggaagtgcaggaaatgcta

SEQ ID NO: 3024 - DNA, 20 bp, Sus scrofa
agtactggggatggaagtgc

SEQ ID NO: 3025 - DNA, 20 bp, Sus scrofa
gaaggtaaaagtactgggga

SEQ ID NO: 3026 - DNA, 20 bp, Sus scrofa
aaatgaaggtaaaagtactg

SEQ ID NO: 3027 - DNA, 20 bp, Sus scrofa
gaaatgaaggtaaaagtact

SEQ ID NO: 3028 - DNA, 20 bp, Sus scrofa
ggaaatgaaggtaaaagtac

SEQ ID NO: 3029 - DNA, 20 bp, Sus scrofa
ttgccatagtctggaaatga

SEQ ID NO: 3030 - DNA, 20 bp, Sus scrofa
ttaccttcatttccagacta

SEQ ID NO: 3031 - DNA, 20 bp, Sus scrofa
atgtgcagcttgccatagtc

SEQ ID NO: 3032 - DNA, 20 bp, Sus scrofa
ctgcacatcacatttctcta

SEQ ID NO: 3033 - DNA, 20 bp, Sus scrofa
tgcttcttatgtgtgaccct

SEQ ID NO: 3034 - DNA, 20 bp, Sus scrofa
ccacaaaacaaattagccaa

SEQ ID NO: 3035 - DNA, 20 bp, Sus scrofa
accacaaaacaaattagcca

SEQ ID NO: 3036 - DNA, 20 bp, Sus scrofa
cccttggctaatttgttttg

SEQ ID NO: 3037 - DNA, 20 bp, Sus scrofa
gctaatttgttttgtggtct

SEQ ID NO: 3038 - DNA, 20 bp, Sus scrofa
gcaaaagaacctaaggctga

SEQ ID NO: 3039 - DNA, 20 bp, Sus scrofa
tgcaaaagaacctaaggctg

SEQ ID NO: 3040 - DNA, 20 bp, Sus scrofa
aacttacagccctcagcctt

SEQ ID NO: 3041 - DNA, 20 bp, Sus scrofa
caatcatgcaaaagaaccta

SEQ ID NO: 3042 - DNA, 20 bp, Sus scrofa
cttaggttcttttgcatgat

SEQ ID NO: 3043 - DNA, 20 bp, Sus scrofa
caactggaaaccgctgattt

SEQ ID NO: 3044 - DNA, 20 bp, Sus scrofa
cacatttctgcccaaatcag

SEQ ID NO: 3045 - DNA, 20 bp, Sus scrofa
ccaactggaaaccgctgatt

SEQ ID NO: 3046 - DNA, 20 bp, Sus scrofa
ccaaatcagcggtttccagt

SEQ ID NO: 3047 - DNA, 20 bp, Sus scrofa
aatcagcggtttccagttgg

SEQ ID NO: 3048 - DNA, 20 bp, Sus scrofa
ccttgtgtccaaccaccaac

SEQ ID NO: 3049 - DNA, 20 bp, Sus scrofa
agcggtttccagttggtggt

SEQ ID NO: 3050 - DNA, 20 bp, Sus scrofa
ccagttggtggttggacaca

SEQ ID NO: 3051 - DNA, 20 bp, Sus scrofa
cagttggtggttggacacaa

SEQ ID NO: 3052 - DNA, 20 bp, Sus scrofa
gagcaaacaccgcggtgctg

SEQ ID NO: 3053 - DNA, 20 bp, Sus scrofa
acacaagggcctcagcaccg

SEQ ID NO: 3054 - DNA, 20 bp, Sus scrofa
cagaagcagagcaaacaccg

SEQ ID NO: 3055 - DNA, 20 bp, Sus scrofa
taccaaaatgacagcagcat

SEQ ID NO: 3056 - DNA, 20 bp, Sus scrofa
tgccaatgctgctgtcattt

SEQ ID NO: 3057 - DNA, 20 bp, Sus scrofa
tgctgctgtcattttggtag

SEQ ID NO: 3058 - DNA, 20 bp, Sus scrofa
tgctgtcattttggtagagg

SEQ ID NO: 3059 - DNA, 20 bp, Sus scrofa
gtcattttggtagaggtggc

SEQ ID NO: 3060 - DNA, 20 bp, Sus scrofa
tcattttggtagaggtggca

SEQ ID NO: 3061 - DNA, 20 bp, Sus scrofa
tttggtagaggtggcaggga

SEQ ID NO: 3062 - DNA, 20 bp, Sus scrofa
ggtagaggtggcagggaagg

SEQ ID NO: 3063 - DNA, 20 bp, Sus scrofa
ggtggcagggaaggaggcca

SEQ ID NO: 3064 - DNA, 20 bp, Sus scrofa
agggaaggaggccaaggtcg

SEQ ID NO: 3065 - DNA, 20 bp, Sus scrofa
agagaagaaaccctcgacct

SEQ ID NO: 3066 - DNA, 20 bp, Sus scrofa
gggaaggaggccaaggtcga

SEQ ID NO: 3067 - DNA, 20 bp, Sus scrofa
agaggcggggaaaggctaag

SEQ ID NO: 3068 - DNA, 20 bp, Sus scrofa
agggcagaagaggcggggaa

SEQ ID NO: 3069 - DNA, 20 bp, Sus scrofa
ctgggagggcagaagaggcg

SEQ ID NO: 3070 - DNA, 20 bp, Sus scrofa
gctgggagggcagaagaggc

SEQ ID NO: 3071 - DNA, 20 bp, Sus scrofa
ggctgggagggcagaagagg

SEQ ID NO: 3072 - DNA, 20 bp, Sus scrofa
gagggctgggagggcagaag

SEQ ID NO: 3073 - DNA, 20 bp, Sus scrofa
actgcccaggagggctggga

SEQ ID NO: 3074 - DNA, 20 bp, Sus scrofa
cactgcccaggagggctggg

SEQ ID NO: 3075 - DNA, 20 bp, Sus scrofa
ccacactgcccaggagggct

SEQ ID NO: 3076 - DNA, 20 bp, Sus scrofa
cccacactgcccaggagggc

SEQ ID NO: 3077 - DNA, 20 bp, Sus scrofa
ttctgccctcccagccctcc

SEQ ID NO: 3078 - DNA, 20 bp, Sus scrofa
tctgccctcccagccctcct

SEQ ID NO: 3079 - DNA, 20 bp, Sus scrofa
cctccccacactgcccagga

SEQ ID NO: 3080 - DNA, 20 bp, Sus scrofa
gcctccccacactgcccagg

SEQ ID NO: 3081 - DNA, 20 bp, Sus scrofa
cctgcctccccacactgccc

SEQ ID NO: 3082 - DNA, 20 bp, Sus scrofa
cccagccctcctgggcagtg

SEQ ID NO: 3083 - DNA, 20 bp, Sus scrofa
ccagccctcctgggcagtgt

SEQ ID NO: 3084 - DNA, 20 bp, Sus scrofa
cagccctcctgggcagtgtg

SEQ ID NO: 3085 - DNA, 20 bp, Sus scrofa
ccctcctgggcagtgtgggg

SEQ ID NO: 3086 - DNA, 20 bp, Sus scrofa
cctgggcagtgtggggaggc

SEQ ID NO: 3087 - DNA, 20 bp, Sus scrofa
ggcagtgtggggaggcaggc

SEQ ID NO: 3088 - DNA, 20 bp, Sus scrofa
gtgtggggaggcaggcagga

SEQ ID NO: 3089 - DNA, 20 bp, Sus scrofa
tggggaggcaggcaggaagg

SEQ ID NO: 3090 - DNA, 20 bp, Sus scrofa
ggggaggcaggcaggaaggc

SEQ ID NO: 3091 - DNA, 20 bp, Sus scrofa
gaggcaggcaggaaggcggg

SEQ ID NO: 3092 - DNA, 20 bp, Sus scrofa
aggcaggcaggaaggcggga

SEQ ID NO: 3093 - DNA, 20 bp, Sus scrofa
aggcaggaaggcgggagggc

SEQ ID NO: 3094 - DNA, 20 bp, Sus scrofa
ggcaggaaggcgggagggct

SEQ ID NO: 3095 - DNA, 20 bp, Sus scrofa
gcaggaaggcgggagggctg

SEQ ID NO: 3096 - DNA, 20 bp, Sus scrofa
aaggcgggagggctggggtc

SEQ ID NO: 3097 - DNA, 20 bp, Sus scrofa
gggagggctggggtcaggcc

SEQ ID NO: 3098 - DNA, 20 bp, Sus scrofa
ggagggctggggtcaggccc

SEQ ID NO: 3099 - DNA, 20 bp, Sus scrofa
gagggctggggtcaggcccg

SEQ ID NO: 3100 - DNA, 20 bp, Sus scrofa
gctgttaggaaaagagcccc

SEQ ID NO: 3101 - DNA, 20 bp, Sus scrofa
agctgttaggaaaagagccc

SEQ ID NO: 3102 - DNA, 20 bp, Sus scrofa
ggaaaaagaacacagctgtt

SEQ ID NO: 3103 - DNA, 20 bp, Sus scrofa
gaagcaagaggaaacaaaag

SEQ ID NO: 3104 - DNA, 20 bp, Sus scrofa
ggtgaactccttgaagcaag

SEQ ID NO: 3105 - DNA, 20 bp, Sus scrofa
ttttgtttcctcttgcttca

SEQ ID NO: 3106 - DNA, 20 bp, Sus scrofa
ttgcttcaaggagttcaccg

SEQ ID NO: 3107 - DNA, 20 bp, Sus scrofa
tcaaggagttcaccgtggag

SEQ ID NO: 3108 - DNA, 20 bp, Sus scrofa
cagcatgacaggcctctcca

SEQ ID NO: 3109 - DNA, 20 bp, Sus scrofa
ggtctacaccccagcatgac

SEQ ID NO: 3110 - DNA, 20 bp, Sus scrofa
cgtggagaggcctgtcatgc

SEQ ID NO: 3111 - DNA, 20 bp, Sus scrofa
gtggagaggcctgtcatgct

SEQ ID NO: 3112 - DNA, 20 bp, Sus scrofa
tggagaggcctgtcatgctg

SEQ ID NO: 3113 - DNA, 20 bp, Sus scrofa
tggggtgtagaccccaagtt

SEQ ID NO: 3114 - DNA, 20 bp, Sus scrofa
gtcttaatcctcctaacttg

SEQ ID NO: 3115 - DNA, 20 bp, Sus scrofa
agtcttaatcctcctaactt

SEQ ID NO: 3116 - DNA, 20 bp, Sus scrofa
cagtcttaatcctcctaact

SEQ ID NO: 3117 - DNA, 20 bp, Sus scrofa
ggtgtagaccccaagttagg

SEQ ID NO: 3118 - DNA, 20 bp, Sus scrofa
caagttaggaggattaagac

SEQ ID NO: 3119 - DNA, 20 bp, Sus scrofa
ggaggattaagactggcccc

SEQ ID NO: 3120 - DNA, 20 bp, Sus scrofa
attaagactggccccaggtt

SEQ ID NO: 3121 - DNA, 20 bp, Sus scrofa
ccaatgtagaacctaacctg

SEQ ID NO: 3122 - DNA, 20 bp, Sus scrofa
cccaatgtagaacctaacct

SEQ ID NO: 3123 - DNA, 20 bp, Sus scrofa
gcccaatgtagaacctaacc

SEQ ID NO: 3124 - DNA, 20 bp, Sus scrofa
ccccaggttaggttctacat

SEQ ID NO: 3125 - DNA, 20 bp, Sus scrofa
cccaggttaggttctacatt

SEQ ID NO: 3126 - DNA, 20 bp, Sus scrofa
tgggctaaactgtgtgacct

SEQ ID NO: 3127 - DNA, 20 bp, Sus scrofa
gggctaaactgtgtgacctt

SEQ ID NO: 3128 - DNA, 20 bp, Sus scrofa
aaactgtgtgaccttgggtg

SEQ ID NO: 3129 - DNA, 20 bp, Sus scrofa
tcaatccagctcctcaccca

SEQ ID NO: 3130 - DNA, 20 bp, Sus scrofa
tgtgaccttgggtgaggagc

SEQ ID NO: 3131 - DNA, 20 bp, Sus scrofa
aggagctggattgaatccag

SEQ ID NO: 3132 - DNA, 20 bp, Sus scrofa
cgccacctctggggaaccac

SEQ ID NO: 3133 - DNA, 20 bp, Sus scrofa
tgaatccagtggttccccag

SEQ ID NO: 3134 - DNA, 20 bp, Sus scrofa
atccagtggttccccagagg

SEQ ID NO: 3135 - DNA, 20 bp, Sus scrofa
caccatcatcgccacctctg

SEQ ID NO: 3136 - DNA, 20 bp, Sus scrofa
acaccatcatcgccacctct

SEQ ID NO: 3137 - DNA, 20 bp, Sus scrofa
gacaccatcatcgccacctc

SEQ ID NO: 3138 - DNA, 20 bp, Sus scrofa
ttccccagaggtggcgatga

SEQ ID NO: 3139 - DNA, 20 bp, Sus scrofa
aaatgtgcttcagaaactaa

SEQ ID NO: 3140 - DNA, 20 bp, Sus scrofa
agcacatttctatagccagc

SEQ ID NO: 3141 - DNA, 20 bp, Sus scrofa
gcctctgccgaatttccagc

SEQ ID NO: 3142 - DNA, 20 bp, Sus scrofa
tctatagccagctggaaatt

SEQ ID NO: 3143 - DNA, 20 bp, Sus scrofa
gccagctggaaattcggcag

SEQ ID NO: 3144 - DNA, 20 bp, Sus scrofa
cacttctggcaggctagtac

SEQ ID NO: 3145 - DNA, 20 bp, Sus scrofa
acacttctggcaggctagta

SEQ ID NO: 3146 - DNA, 20 bp, Sus scrofa
caggacaggacacttctggc

SEQ ID NO: 3147 - DNA, 20 bp, Sus scrofa
gattcaggacaggacacttc

SEQ ID NO: 3148 - DNA, 20 bp, Sus scrofa
aggccattcagattcaggac

SEQ ID NO: 3149 - DNA, 20 bp, Sus scrofa
acaccaggccattcagattc

SEQ ID NO: 3150 - DNA, 20 bp, Sus scrofa
tgtcctgtcctgaatctgaa

SEQ ID NO: 3151 - DNA, 20 bp, Sus scrofa
tgtcctgaatctgaatggcc

SEQ ID NO: 3152 - DNA, 20 bp, Sus scrofa
agcccatttaaaaagacacc

SEQ ID NO: 3153 - DNA, 20 bp, Sus scrofa
tggcctggtgtctttttaaa

SEQ ID NO: 3154 - DNA, 20 bp, Sus scrofa
ggcctggtgtctttttaaat

SEQ ID NO: 3155 - DNA, 20 bp, Sus scrofa
tttaaatgggctatgttgct

SEQ ID NO: 3156 - DNA, 20 bp, Sus scrofa
aatgggctatgttgctaggc

SEQ ID NO: 3157 - DNA, 20 bp, Sus scrofa
atgggctatgttgctaggct

SEQ ID NO: 3158 - DNA, 20 bp, Sus scrofa
gctatgttgctaggctggga

SEQ ID NO: 3159 - DNA, 20 bp, Sus scrofa
ctatgttgctaggctgggaa

SEQ ID NO: 3160 - DNA, 20 bp, Sus scrofa
tatgttgctaggctgggaag

SEQ ID NO: 3161 - DNA, 20 bp, Sus scrofa
gggaaggggctgtgatctgc

SEQ ID NO: 3162 - DNA, 20 bp, Sus scrofa
gctggctcatgatcgctaca

SEQ ID NO: 3163 - DNA, 20 bp, Sus scrofa
atcgctacatggtgatgcca

SEQ ID NO: 3164 - DNA, 20 bp, Sus scrofa
caaaagttaattaatttccg

SEQ ID NO: 3165 - DNA, 20 bp, Sus scrofa
ccatggaccaagtggaagaa

SEQ ID NO: 3166 - DNA, 20 bp, Sus scrofa
gtgcaaaccattcttccact

SEQ ID NO: 3167 - DNA, 20 bp, Sus scrofa
tccactccccatggaccaag

SEQ ID NO: 3168 - DNA, 20 bp, Sus scrofa
ccattcttccacttggtcca

SEQ ID NO: 3169 - DNA, 20 bp, Sus scrofa
cattcttccacttggtccat

SEQ ID NO: 3170 - DNA, 20 bp, Sus scrofa
attcttccacttggtccatg

SEQ ID NO: 3171 - DNA, 20 bp, Sus scrofa
agacagccatccactcccca

SEQ ID NO: 3172 - DNA, 20 bp, Sus scrofa
tccacttggtccatggggag

SEQ ID NO: 3173 - DNA, 20 bp, Sus scrofa
cttggtccatggggagtgga

SEQ ID NO: 3174 - DNA, 20 bp, Sus scrofa
tgtggtgggtctggtgtgga

SEQ ID NO: 3175 - DNA, 20 bp, Sus scrofa
tttctgtggtgggtctggtg

SEQ ID NO: 3176 - DNA, 20 bp, Sus scrofa
cagagtttctgtggtgggtc

SEQ ID NO: 3177 - DNA, 20 bp, Sus scrofa
tagctcagagtttctgtggt

SEQ ID NO: 3178 - DNA, 20 bp, Sus scrofa
atagctcagagtttctgtgg

SEQ ID NO: 3179 - DNA, 20 bp, Sus scrofa
gacatagctcagagtttctg

SEQ ID NO: 3180 - DNA, 20 bp, Sus scrofa
agtcagcaaggtgtgaaaag

SEQ ID NO: 3181 - DNA, 20 bp, Sus scrofa
gagtcagcaaggtgtgaaaa

SEQ ID NO: 3182 - DNA, 20 bp, Sus scrofa
cgagtcagcaaggtgtgaaa

SEQ ID NO: 3183 - DNA, 20 bp, Sus scrofa
ctaccggagtcgagtcagca

SEQ ID NO: 3184 - DNA, 20 bp, Sus scrofa
acaccttgctgactcgactc

SEQ ID NO: 3185 - DNA, 20 bp, Sus scrofa
cttgctgactcgactccggt

SEQ ID NO: 3186 - DNA, 20 bp, Sus scrofa
accacttgtggaaatcctac

SEQ ID NO: 3187 - DNA, 20 bp, Sus scrofa
tccggtaggatttccacaag

SEQ ID NO: 3188 - DNA, 20 bp, Sus scrofa
agctgggctgggaccacttg

SEQ ID NO: 3189 - DNA, 20 bp, Sus scrofa
gatttaagcccagctgggct

SEQ ID NO: 3190 - DNA, 20 bp, Sus scrofa
ggatttaagcccagctgggc

SEQ ID NO: 3191 - DNA, 20 bp, Sus scrofa
acaagtggtcccagcccagc

SEQ ID NO: 3192 - DNA, 20 bp, Sus scrofa
caagtggtcccagcccagct

SEQ ID NO: 3193 - DNA, 20 bp, Sus scrofa
tcagggatttaagcccagct

SEQ ID NO: 3194 - DNA, 20 bp, Sus scrofa
ttcagggatttaagcccagc

SEQ ID NO: 3195 - DNA, 20 bp, Sus scrofa
gactcctgaaattaatttca

SEQ ID NO: 3196 - DNA, 20 bp, Sus scrofa
tgactcctgaaattaatttc

SEQ ID NO: 3197 - DNA, 20 bp, Sus scrofa
aaatccctgaaattaatttc

SEQ ID NO: 3198 - DNA, 20 bp, Sus scrofa
gtcaaaatcagccaaaaatc

SEQ ID NO: 3199 - DNA, 20 bp, Sus scrofa
tgtctcagctgcctgatttt

SEQ ID NO: 3200 - DNA, 20 bp, Sus scrofa
aaatcaggcagctgagacag

SEQ ID NO: 3201 - DNA, 20 bp, Sus scrofa
aatcaggcagctgagacaga

SEQ ID NO: 3202 - DNA, 20 bp, Sus scrofa
ggcagctgagacagagggcc

SEQ ID NO: 3203 - DNA, 20 bp, Sus scrofa
aagatgcgaaaatggcttcc

SEQ ID NO: 3204 - DNA, 20 bp, Sus scrofa
tacacaaaaagatgcgaaaa

SEQ ID NO: 3205 - DNA, 20 bp, Sus scrofa
agcaccccaactctactctt

SEQ ID NO: 3206 - DNA, 20 bp, Sus scrofa
aagcaccccaactctactct

SEQ ID NO: 3207 - DNA, 20 bp, Sus scrofa
tattttcccaagagtagagt

SEQ ID NO: 3208 - DNA, 20 bp, Sus scrofa
attttcccaagagtagagtt

SEQ ID NO: 3209 - DNA, 20 bp, Sus scrofa
ttttcccaagagtagagttg

SEQ ID NO: 3210 - DNA, 20 bp, Sus scrofa
ctttgcttcaaaaatgaata

SEQ ID NO: 3211 - DNA, 20 bp, Sus scrofa
tttgcttcaaaaatgaataa

SEQ ID NO: 3212 - DNA, 20 bp, Sus scrofa
ttgcttcaaaaatgaataag

SEQ ID NO: 3213 - DNA, 20 bp, Sus scrofa
gatggagttggggagagcaa

SEQ ID NO: 3214 - DNA, 20 bp, Sus scrofa
tagaagaaaggatggagttg

SEQ ID NO: 3215 - DNA, 20 bp, Sus scrofa
ctagaagaaaggatggagtt

SEQ ID NO: 3216 - DNA, 20 bp, Sus scrofa
cctagaagaaaggatggagt

SEQ ID NO: 3217 - DNA, 20 bp, Sus scrofa
actcaccctagaagaaagga

SEQ ID NO: 3218 - DNA, 20 bp, Sus scrofa
gctcactcaccctagaagaa

SEQ ID NO: 3219 - DNA, 20 bp, Sus scrofa
ccaactccatcctttcttct

SEQ ID NO: 3220 - DNA, 20 bp, Sus scrofa
caactccatcctttcttcta

SEQ ID NO: 3221 - DNA, 20 bp, Sus scrofa
ttcttctagggtgagtgagc

SEQ ID NO: 3222 - DNA, 20 bp, Sus scrofa
gcccagaggggctggctaag

SEQ ID NO: 3223 - DNA, 20 bp, Sus scrofa
ggtgccctgcccagaggggc

SEQ ID NO: 3224 - DNA, 20 bp, Sus scrofa
gaccacttagccagcccctc

SEQ ID NO: 3225 - DNA, 20 bp, Sus scrofa
accacttagccagcccctct

SEQ ID NO: 3226 - DNA, 20 bp, Sus scrofa
ttctggtgccctgcccagag

SEQ ID NO: 3227 - DNA, 20 bp, Sus scrofa
cttctggtgccctgcccaga

SEQ ID NO: 3228 - DNA, 20 bp, Sus scrofa
cttagccagcccctctgggc

SEQ ID NO: 3229 - DNA, 20 bp, Sus scrofa
ccttctggtgccctgcccag

SEQ ID NO: 3230 - DNA, 20 bp, Sus scrofa
ttagccagcccctctgggca

SEQ ID NO: 3231 - DNA, 20 bp, Sus scrofa
cctctgggcagggcaccaga

SEQ ID NO: 3232 - DNA, 20 bp, Sus scrofa
ctctgggcagggcaccagaa

SEQ ID NO: 3233 - DNA, 20 bp, Sus scrofa
tctgggcagggcaccagaag

SEQ ID NO: 3234 - DNA, 20 bp, Sus scrofa
gagatcttggtatccccttc

SEQ ID NO: 3235 - DNA, 20 bp, Sus scrofa
cttggtaaggtctgagatct

SEQ ID NO: 3236 - DNA, 20 bp, Sus scrofa
caagatctcagaccttacca

SEQ ID NO: 3237 - DNA, 20 bp, Sus scrofa
ccccagacacggccttggta

SEQ ID NO: 3238 - DNA, 20 bp, Sus scrofa
ctctcccccagacacggcct

SEQ ID NO: 3239 - DNA, 20 bp, Sus scrofa
gaccttaccaaggccgtgtc

SEQ ID NO: 3240 - DNA, 20 bp, Sus scrofa
accttaccaaggccgtgtct

SEQ ID NO: 3241 - DNA, 20 bp, Sus scrofa
ccttaccaaggccgtgtctg

SEQ ID NO: 3242 - DNA, 20 bp, Sus scrofa
cacagtctctcccccagaca

SEQ ID NO: 3243 - DNA, 20 bp, Sus scrofa
cttaccaaggccgtgtctgg

SEQ ID NO: 3244 - DNA, 20 bp, Sus scrofa
tgtctgggggagagactgtg

SEQ ID NO: 3245 - DNA, 20 bp, Sus scrofa
gactgtgaggaaagactgac

SEQ ID NO: 3246 - DNA, 20 bp, Sus scrofa
aaagactgacaggtgtcttg

SEQ ID NO: 3247 - DNA, 20 bp, Sus scrofa
gcacccagagagctgctgct

SEQ ID NO: 3248 - DNA, 20 bp, Sus scrofa
gtggccaagcagcagctctc

SEQ ID NO: 3249 - DNA, 20 bp, Sus scrofa
tggccaagcagcagctctct

SEQ ID NO: 3250 - DNA, 20 bp, Sus scrofa
cagcagctctctgggtgccc

SEQ ID NO: 3251 - DNA, 20 bp, Sus scrofa
cagctctctgggtgccctgg

SEQ ID NO: 3252 - DNA, 20 bp, Sus scrofa
agctctctgggtgccctggt

SEQ ID NO: 3253 - DNA, 20 bp, Sus scrofa
gctctctgggtgccctggtg

SEQ ID NO: 3254 - DNA, 20 bp, Sus scrofa
ctctctgggtgccctggtgg

SEQ ID NO: 3255 - DNA, 20 bp, Sus scrofa
acacaccctgtcccccacca

SEQ ID NO: 3256 - DNA, 20 bp, Sus scrofa
aacacaccctgtcccccacc

SEQ ID NO: 3257 - DNA, 20 bp, Sus scrofa
tgggtgccctggtgggggac

SEQ ID NO: 3258 - DNA, 20 bp, Sus scrofa
gggtgccctggtgggggaca

SEQ ID NO: 3259 - DNA, 20 bp, Sus scrofa
gggggacagggtgtgttccc

SEQ ID NO: 3260 - DNA, 20 bp, Sus scrofa
ggggacagggtgtgttccct

SEQ ID NO: 3261 - DNA, 20 bp, Sus scrofa
gggacagggtgtgttccctg

SEQ ID NO: 3262 - DNA, 20 bp, Sus scrofa
acagggtgtgttccctgggg

SEQ ID NO: 3263 - DNA, 20 bp, Sus scrofa
cagggtgtgttccctgggga

SEQ ID NO: 3264 - DNA, 20 bp, Sus scrofa
actcctcccatccctcccca

SEQ ID NO: 3265 - DNA, 20 bp, Sus scrofa
cactcctcccatccctcccc

SEQ ID NO: 3266 - DNA, 20 bp, Sus scrofa
gtgtgttccctggggaggga

SEQ ID NO: 3267 - DNA, 20 bp, Sus scrofa
tgtgttccctggggagggat

SEQ ID NO: 3268 - DNA, 20 bp, Sus scrofa
gttccctggggagggatggg

SEQ ID NO: 3269 - DNA, 20 bp, Sus scrofa
ctggggagggatgggaggag

SEQ ID NO: 3270 - DNA, 20 bp, Sus scrofa
gggaggagtggaattccact

SEQ ID NO: 3271 - DNA, 20 bp, Sus scrofa
tccttgaacccaaagccaag

SEQ ID NO: 3272 - DNA, 20 bp, Sus scrofa
agtggaattccacttggctt

SEQ ID NO: 3273 - DNA, 20 bp, Sus scrofa
gtggaattccacttggcttt

SEQ ID NO: 3274 - DNA, 20 bp, Sus scrofa
tccacttggctttgggttca

SEQ ID NO: 3275 - DNA, 20 bp, Sus scrofa
gctttgggttcaaggaagtg

SEQ ID NO: 3276 - DNA, 20 bp, Sus scrofa
gggttcaaggaagtgaggcc

SEQ ID NO: 3277 - DNA, 20 bp, Sus scrofa
ggttcaaggaagtgaggcct

SEQ ID NO: 3278 - DNA, 20 bp, Sus scrofa
gttcaaggaagtgaggcctg

SEQ ID NO: 3279 - DNA, 20 bp, Sus scrofa
cgtttatgaagtgcttcccc

SEQ ID NO: 3280 - DNA, 20 bp, Sus scrofa
acttcataaacgattaacac

SEQ ID NO: 3281 - DNA, 20 bp, Sus scrofa
cttcataaacgattaacaca

SEQ ID NO: 3282 - DNA, 20 bp, Sus scrofa
cataaacgattaacacaggg

SEQ ID NO: 3283 - DNA, 20 bp, Sus scrofa
taacacagggaggaaatgcc

SEQ ID NO: 3284 - DNA, 20 bp, Sus scrofa
cacagggaggaaatgccagg

SEQ ID NO: 3285 - DNA, 20 bp, Sus scrofa
agcacacacttcacaccacc

SEQ ID NO: 3286 - DNA, 20 bp, Sus scrofa
gaagtgtgtgctgccagtca

SEQ ID NO: 3287 - DNA, 20 bp, Sus scrofa
aagtgtgtgctgccagtcac

SEQ ID NO: 3288 - DNA, 20 bp, Sus scrofa
accacccctttgcccgtgac

SEQ ID NO: 3289 - DNA, 20 bp, Sus scrofa
gtgctgccagtcacgggcaa

SEQ ID NO: 3290 - DNA, 20 bp, Sus scrofa
tgctgccagtcacgggcaaa

SEQ ID NO: 3291 - DNA, 20 bp, Sus scrofa
gctgccagtcacgggcaaag

SEQ ID NO: 3292 - DNA, 20 bp, Sus scrofa
gccagtcacgggcaaagggg

SEQ ID NO: 3293 - DNA, 20 bp, Sus scrofa
cacgggcaaaggggtggtgc

SEQ ID NO: 3294 - DNA, 20 bp, Sus scrofa
caaaggggtggtgcaggaac

SEQ ID NO: 3295 - DNA, 20 bp, Sus scrofa
aacaggcttgaaaagagaca

SEQ ID NO: 3296 - DNA, 20 bp, Sus scrofa
acaggcttgaaaagagacat

SEQ ID NO: 3297 - DNA, 20 bp, Sus scrofa
caggcttgaaaagagacatg

SEQ ID NO: 3298 - DNA, 20 bp, Sus scrofa
agagacatggggatttagtc

SEQ ID NO: 3299 - DNA, 20 bp, Sus scrofa
gagacatggggatttagtca

SEQ ID NO: 3300 - DNA, 20 bp, Sus scrofa
agacatggggatttagtcag

SEQ ID NO: 3301 - DNA, 20 bp, Sus scrofa
gacatggggatttagtcagg

SEQ ID NO: 3302 - DNA, 20 bp, Sus scrofa
atttagtcagggggcattga

SEQ ID NO: 3303 - DNA, 20 bp, Sus scrofa
gtcagggggcattgatggtc

SEQ ID NO: 3304 - DNA, 20 bp, Sus scrofa
tcagggggcattgatggtca

SEQ ID NO: 3305 - DNA, 20 bp, Sus scrofa
cagggggcattgatggtcag

SEQ ID NO: 3306 - DNA, 20 bp, Sus scrofa
agggggcattgatggtcagg

SEQ ID NO: 3307 - DNA, 20 bp, Sus scrofa
ggcattgatggtcagggggc

SEQ ID NO: 3308 - DNA, 20 bp, Sus scrofa
gcattgatggtcagggggct

SEQ ID NO: 3309 - DNA, 20 bp, Sus scrofa
gggggctgggagtcctcctc

SEQ ID NO: 3310 - DNA, 20 bp, Sus scrofa
tcaggcgccaaatccagagg

SEQ ID NO: 3311 - DNA, 20 bp, Sus scrofa
ggatcaggcgccaaatccag

SEQ ID NO: 3312 - DNA, 20 bp, Sus scrofa
tgggagtcctcctctggatt

SEQ ID NO: 3313 - DNA, 20 bp, Sus scrofa
ctttaaacggcatggggatc

SEQ ID NO: 3314 - DNA, 20 bp, Sus scrofa
aaaagcctttaaacggcatg

SEQ ID NO: 3315 - DNA, 20 bp, Sus scrofa
caaaagcctttaaacggcat

SEQ ID NO: 3316 - DNA, 20 bp, Sus scrofa
ccaaaagcctttaaacggca

SEQ ID NO: 3317 - DNA, 20 bp, Sus scrofa
ctgatccccatgccgtttaa

SEQ ID NO: 3318 - DNA, 20 bp, Sus scrofa
tctgtccaaaagcctttaaa

SEQ ID NO: 3319 - DNA, 20 bp, Sus scrofa
ccatgccgtttaaaggcttt

SEQ ID NO: 3320 - DNA, 20 bp, Sus scrofa
tgtgatcgaagcagtgtttt

SEQ ID NO: 3321 - DNA, 20 bp, Sus scrofa
atcgaagcagtgttttagga

SEQ ID NO: 3322 - DNA, 20 bp, Sus scrofa
gaagcagtgttttaggaagg

SEQ ID NO: 3323 - DNA, 20 bp, Sus scrofa
gtgttttaggaaggtggccc

SEQ ID NO: 3324 - DNA, 20 bp, Sus scrofa
gagcggagagggtacatcct

SEQ ID NO: 3325 - DNA, 20 bp, Sus scrofa
agagcggagagggtacatcc

SEQ ID NO: 3326 - DNA, 20 bp, Sus scrofa
gaaggcccagagagcggaga

SEQ ID NO: 3327 - DNA, 20 bp, Sus scrofa
ggaaggcccagagagcggag

SEQ ID NO: 3328 - DNA, 20 bp, Sus scrofa
gatgtaccctctccgctctc

SEQ ID NO: 3329 - DNA, 20 bp, Sus scrofa
atgtaccctctccgctctct

SEQ ID NO: 3330 - DNA, 20 bp, Sus scrofa
gatgaggaaggcccagagag

SEQ ID NO: 3331 - DNA, 20 bp, Sus scrofa
cccaaggagcttgatgagga

SEQ ID NO: 3332 - DNA, 20 bp, Sus scrofa
gagccccaaggagcttgatg

SEQ ID NO: 3333 - DNA, 20 bp, Sus scrofa
gccttcctcatcaagctcct

SEQ ID NO: 3334 - DNA, 20 bp, Sus scrofa
ccttcctcatcaagctcctt

SEQ ID NO: 3335 - DNA, 20 bp, Sus scrofa
cttcctcatcaagctccttg

SEQ ID NO: 3336 - DNA, 20 bp, Sus scrofa
cacacaacagaagagcccca

SEQ ID NO: 3337 - DNA, 20 bp, Sus scrofa
cttggggctcttctgttgtg

SEQ ID NO: 3338 - DNA, 20 bp, Sus scrofa
ttggggctcttctgttgtgt

SEQ ID NO: 3339 - DNA, 20 bp, Sus scrofa
tggggctcttctgttgtgtg

SEQ ID NO: 3340 - DNA, 20 bp, Sus scrofa
tctgttgtgtggggccaatg

SEQ ID NO: 3341 - DNA, 20 bp, Sus scrofa
gttgtgtggggccaatgcgg

SEQ ID NO: 3342 - DNA, 20 bp, Sus scrofa
tgatctaggagccaccgcat

SEQ ID NO: 3343 - DNA, 20 bp, Sus scrofa
cacaccacccacgatgatct

SEQ ID NO: 3344 - DNA, 20 bp, Sus scrofa
cggtggctcctagatcatcg

SEQ ID NO: 3345 - DNA, 20 bp, Sus scrofa
ggtggctcctagatcatcgt

SEQ ID NO: 3346 - DNA, 20 bp, Sus scrofa
ggctcctagatcatcgtggg

SEQ ID NO: 3347 - DNA, 20 bp, Sus scrofa
ctagatcatcgtgggtggtg

SEQ ID NO: 3348 - DNA, 20 bp, Sus scrofa
tagatcatcgtgggtggtgt

SEQ ID NO: 3349 - DNA, 20 bp, Sus scrofa
tgggtctttttatgaaccac

SEQ ID NO: 3350 - DNA, 20 bp, Sus scrofa
atgactgctctatgatcctg

SEQ ID NO: 3351 - DNA, 20 bp, Sus scrofa
aggatcatagagcagtcatt

SEQ ID NO: 3352 - DNA, 20 bp, Sus scrofa
agtaggcacgtggactcatg

SEQ ID NO: 3353 - DNA, 20 bp, Sus scrofa
gagtaggcacgtggactcat

SEQ ID NO: 3354 - DNA, 20 bp, Sus scrofa
ggagtaggcacgtggactca

SEQ ID NO: 3355 - DNA, 20 bp, Sus scrofa
gacagcagggagtaggcacg

SEQ ID NO: 3356 - DNA, 20 bp, Sus scrofa
cctacaggacagcagggagt

SEQ ID NO: 3357 - DNA, 20 bp, Sus scrofa
tatcaccctacaggacagca

SEQ ID NO: 3358 - DNA, 20 bp, Sus scrofa
ctatcaccctacaggacagc

SEQ ID NO: 3359 - DNA, 20 bp, Sus scrofa
cctactccctgctgtcctgt

SEQ ID NO: 3360 - DNA, 20 bp, Sus scrofa
ctactccctgctgtcctgta

SEQ ID NO: 3361 - DNA, 20 bp, Sus scrofa
tgtgatgcctatcaccctac

SEQ ID NO: 3362 - DNA, 20 bp, Sus scrofa
ctgctgtcctgtagggtgat

SEQ ID NO: 3363 - DNA, 20 bp, Sus scrofa
gtagggtgataggcatcaca

SEQ ID NO: 3364 - DNA, 20 bp, Sus scrofa
tagggtgataggcatcacat

SEQ ID NO: 3365 - DNA, 20 bp, Sus scrofa
agggtgataggcatcacatg

SEQ ID NO: 3366 - DNA, 20 bp, Sus scrofa
gataggcatcacatggggca

SEQ ID NO: 3367 - DNA, 20 bp, Sus scrofa
tggtttcaaatatgggcatc

SEQ ID NO: 3368 - DNA, 20 bp, Sus scrofa
aaggtgctggtttcaaatat

SEQ ID NO: 3369 - DNA, 20 bp, Sus scrofa
caaggtgctggtttcaaata

SEQ ID NO: 3370 - DNA, 20 bp, Sus scrofa
gccccctgtgctcaaggtgc

SEQ ID NO: 3371 - DNA, 20 bp, Sus scrofa
aaaacagccccctgtgctca

SEQ ID NO: 3372 - DNA, 20 bp, Sus scrofa
gaaaccagcaccttgagcac

SEQ ID NO: 3373 - DNA, 20 bp, Sus scrofa
aaaccagcaccttgagcaca

SEQ ID NO: 3374 - DNA, 20 bp, Sus scrofa
aaccagcaccttgagcacag

SEQ ID NO: 3375 - DNA, 20 bp, Sus scrofa
accagcaccttgagcacagg

SEQ ID NO: 3376 - DNA, 20 bp, Sus scrofa
gggggctgtttttatgatcc

SEQ ID NO: 3377 - DNA, 20 bp, Sus scrofa
gtagtctcttaaaacacacc

SEQ ID NO: 3378 - DNA, 20 bp, Sus scrofa
catgattgactttcgcattt

SEQ ID NO: 3379 - DNA, 20 bp, Sus scrofa
ttcgcatttcggtaattatc

SEQ ID NO: 3380 - DNA, 20 bp, Sus scrofa
tcgcatttcggtaattatcc

SEQ ID NO: 3381 - DNA, 20 bp, Sus scrofa
aggacgctgggcaattatcc

SEQ ID NO: 3382 - DNA, 20 bp, Sus scrofa
gaaaggaaatctaggacgct

SEQ ID NO: 3383 - DNA, 20 bp, Sus scrofa
agaaaggaaatctaggacgc

SEQ ID NO: 3384 - DNA, 20 bp, Sus scrofa
ggatgctagaaaggaaatct

SEQ ID NO: 3385 - DNA, 20 bp, Sus scrofa
atggttgaaggatgctagaa

SEQ ID NO: 3386 - DNA, 20 bp, Sus scrofa
agcccaggagtcatggttga

SEQ ID NO: 3387 - DNA, 20 bp, Sus scrofa
ccagaggagcccaggagtca

SEQ ID NO: 3388 - DNA, 20 bp, Sus scrofa
catccttcaaccatgactcc

SEQ ID NO: 3389 - DNA, 20 bp, Sus scrofa
atccttcaaccatgactcct

SEQ ID NO: 3390 - DNA, 20 bp, Sus scrofa
ttcagaggccagaggagccc

SEQ ID NO: 3391 - DNA, 20 bp, Sus scrofa
ccatgactcctgggctcctc

SEQ ID NO: 3392 - DNA, 20 bp, Sus scrofa
tgggggacttcagaggccag

SEQ ID NO: 3393 - DNA, 20 bp, Sus scrofa
cagaaggtgggggacttcag

SEQ ID NO: 3394 - DNA, 20 bp, Sus scrofa
tgttcctcaacagaaggtgg

SEQ ID NO: 3395 - DNA, 20 bp, Sus scrofa
atgttcctcaacagaaggtg

SEQ ID NO: 3396 - DNA, 20 bp, Sus scrofa
tatgttcctcaacagaaggt

SEQ ID NO: 3397 - DNA, 20 bp, Sus scrofa
ttatgttcctcaacagaagg

SEQ ID NO: 3398 - DNA, 20 bp, Sus scrofa
cagttatgttcctcaacaga

SEQ ID NO: 3399 - DNA, 20 bp, Sus scrofa
aagtcccccaccttctgttg

SEQ ID NO: 3400 - DNA, 20 bp, Sus scrofa
ttgaggaacataactgagtt

SEQ ID NO: 3401 - DNA, 20 bp, Sus scrofa
aacataactgagtttggatg

SEQ ID NO: 3402 - DNA, 20 bp, Sus scrofa
acataactgagtttggatgt

SEQ ID NO: 3403 - DNA, 20 bp, Sus scrofa
aactgagtttggatgtggga

SEQ ID NO: 3404 - DNA, 20 bp, Sus scrofa
actgagtttggatgtgggac

SEQ ID NO: 3405 - DNA, 20 bp, Sus scrofa
atgtgggacgggactaaaag

SEQ ID NO: 3406 - DNA, 20 bp, Sus scrofa
gggacgggactaaaagtgga

SEQ ID NO: 3407 - DNA, 20 bp, Sus scrofa
ggacgggactaaaagtggat

SEQ ID NO: 3408 - DNA, 20 bp, Sus scrofa
ttttagttccaaaattcact

SEQ ID NO: 3409 - DNA, 20 bp, Sus scrofa
cttttagttccaaaattcac

SEQ ID NO: 3410 - DNA, 20 bp, Sus scrofa
tggatgggcccagtgaattt

SEQ ID NO: 3411 - DNA, 20 bp, Sus scrofa
cagtgaattttggaactaaa

SEQ ID NO: 3412 - DNA, 20 bp, Sus scrofa
agtgaattttggaactaaaa

SEQ ID NO: 3413 - DNA, 20 bp, Sus scrofa
ctaatccacacactaaacaa

SEQ ID NO: 3414 - DNA, 20 bp, Sus scrofa
gtgctccattgtttagtgtg

SEQ ID NO: 3415 - DNA, 20 bp, Sus scrofa
ttgtttagtgtgtggattag

SEQ ID NO: 3416 - DNA, 20 bp, Sus scrofa
gactgcagaagcccagagag

SEQ ID NO: 3417 - DNA, 20 bp, Sus scrofa
ggaagtaacatccactctct

SEQ ID NO: 3418 - DNA, 20 bp, Sus scrofa
gggaagtaacatccactctc

SEQ ID NO: 3419 - DNA, 20 bp, Sus scrofa
gagtggatgttacttccccc

SEQ ID NO: 3420 - DNA, 20 bp, Sus scrofa
agtggatgttacttccccca

SEQ ID NO: 3421 - DNA, 20 bp, Sus scrofa
tgacttgcagtgtgccctgg

SEQ ID NO: 3422 - DNA, 20 bp, Sus scrofa
ctgacttgcagtgtgccctg

SEQ ID NO: 3423 - DNA, 20 bp, Sus scrofa
actgacttgcagtgtgccct

SEQ ID NO: 3424 - DNA, 20 bp, Sus scrofa
cactgacttgcagtgtgccc

SEQ ID NO: 3425 - DNA, 20 bp, Sus scrofa
cagggcacactgcaagtcag

SEQ ID NO: 3426 - DNA, 20 bp, Sus scrofa
actgcaagtcagtggcaaag

SEQ ID NO: 3427 - DNA, 20 bp, Sus scrofa
ctgcaagtcagtggcaaagt

SEQ ID NO: 3428 - DNA, 20 bp, Sus scrofa
tgcaagtcagtggcaaagtg

SEQ ID NO: 3429 - DNA, 20 bp, Sus scrofa
agtctaacgacctggactct

SEQ ID NO: 3430 - DNA, 20 bp, Sus scrofa
caaagtggggcccagagtcc

SEQ ID NO: 3431 - DNA, 20 bp, Sus scrofa
cagtctaacgacctggactc

SEQ ID NO: 3432 - DNA, 20 bp, Sus scrofa
catcaggcagtctaacgacc

SEQ ID NO: 3433 - DNA, 20 bp, Sus scrofa
tggtgcaaaggatgctcatc

SEQ ID NO: 3434 - DNA, 20 bp, Sus scrofa
aacatggaggtgtggtgcaa

SEQ ID NO: 3435 - DNA, 20 bp, Sus scrofa
ggacaagaaacatggaggtg

SEQ ID NO: 3436 - DNA, 20 bp, Sus scrofa
aagggggacaagaaacatgg

SEQ ID NO: 3437 - DNA, 20 bp, Sus scrofa
ggaaagggggacaagaaaca

SEQ ID NO: 3438 - DNA, 20 bp, Sus scrofa
gaacggtggccggggaaagg

SEQ ID NO: 3439 - DNA, 20 bp, Sus scrofa
tgaacggtggccggggaaag

SEQ ID NO: 3440 - DNA, 20 bp, Sus scrofa
gtttcttgtccccctttccc

SEQ ID NO: 3441 - DNA, 20 bp, Sus scrofa
ctgaacggtggccggggaaa

SEQ ID NO: 3442 - DNA, 20 bp, Sus scrofa
tctgaacggtggccggggaa

SEQ ID NO: 3443 - DNA, 20 bp, Sus scrofa
tggtgtctgaacggtggccg

SEQ ID NO: 3444 - DNA, 20 bp, Sus scrofa
gtggtgtctgaacggtggcc

SEQ ID NO: 3445 - DNA, 20 bp, Sus scrofa
ggtggtgtctgaacggtggc

SEQ ID NO: 3446 - DNA, 20 bp, Sus scrofa
agcaggtggtgtctgaacgg

SEQ ID NO: 3447 - DNA, 20 bp, Sus scrofa
accagcaggtggtgtctgaa

SEQ ID NO: 3448 - DNA, 20 bp, Sus scrofa
accgttcagacaccacctgc

SEQ ID NO: 3449 - DNA, 20 bp, Sus scrofa
aaggcacagttaccagcagg

SEQ ID NO: 3450 - DNA, 20 bp, Sus scrofa
gtgaaggcacagttaccagc

SEQ ID NO: 3451 - DNA, 20 bp, Sus scrofa
gctggtaactgtgccttcac

SEQ ID NO: 3452 - DNA, 20 bp, Sus scrofa
gtggaagcagagtccagtga

SEQ ID NO: 3453 - DNA, 20 bp, Sus scrofa
aggcgtgaagaagcaggagg

SEQ ID NO: 3454 - DNA, 20 bp, Sus scrofa
ggaaggcgtgaagaagcagg

SEQ ID NO: 3455 - DNA, 20 bp, Sus scrofa
aatggaaggcgtgaagaagc

SEQ ID NO: 3456 - DNA, 20 bp, Sus scrofa
taccttcagcaggtaatgga

SEQ ID NO: 3457 - DNA, 20 bp, Sus scrofa
gtgctaccttcagcaggtaa

SEQ ID NO: 3458 - DNA, 20 bp, Sus scrofa
cgccttccattacctgctga

SEQ ID NO: 3459 - DNA, 20 bp, Sus scrofa
tgtcctgtgctaccttcagc

SEQ ID NO: 3460 - DNA, 20 bp, Sus scrofa
ttacctgctgaaggtagcac

SEQ ID NO: 3461 - DNA, 20 bp, Sus scrofa
tgaagcaggctgcttctaag

SEQ ID NO: 3462 - DNA, 20 bp, Sus scrofa
atgacatgatcaagtgaagc

SEQ ID NO: 3463 - DNA, 20 bp, Sus scrofa
agagatgagggttctggaac

SEQ ID NO: 3464 - DNA, 20 bp, Sus scrofa
acaggaagagatgagggttc

SEQ ID NO: 3465 - DNA, 20 bp, Sus scrofa
acggggacaggaagagatga

SEQ ID NO: 3466 - DNA, 20 bp, Sus scrofa
aacggggacaggaagagatg

SEQ ID NO: 3467 - DNA, 20 bp, Sus scrofa
aaaggaagtgcaacggggac

SEQ ID NO: 3468 - DNA, 20 bp, Sus scrofa
gggggaaaggaagtgcaacg

SEQ ID NO: 3469 - DNA, 20 bp, Sus scrofa
tgggggaaaggaagtgcaac

SEQ ID NO: 3470 - DNA, 20 bp, Sus scrofa
ctgggggaaaggaagtgcaa

SEQ ID NO: 3471 - DNA, 20 bp, Sus scrofa
cagaaggctgtctgggggaa

SEQ ID NO: 3472 - DNA, 20 bp, Sus scrofa
aggcccagaaggctgtctgg

SEQ ID NO: 3473 - DNA, 20 bp, Sus scrofa
taggcccagaaggctgtctg

SEQ ID NO: 3474 - DNA, 20 bp, Sus scrofa
ataggcccagaaggctgtct

SEQ ID NO: 3475 - DNA, 20 bp, Sus scrofa
aataggcccagaaggctgtc

SEQ ID NO: 3476 - DNA, 20 bp, Sus scrofa
ctttcccccagacagccttc

SEQ ID NO: 3477 - DNA, 20 bp, Sus scrofa
tttcccccagacagccttct

SEQ ID NO: 3478 - DNA, 20 bp, Sus scrofa
cagcagagaataggcccaga

SEQ ID NO: 3479 - DNA, 20 bp, Sus scrofa
ttcccagagcagcagagaat

SEQ ID NO: 3480 - DNA, 20 bp, Sus scrofa
gggcctattctctgctgctc

SEQ ID NO: 3481 - DNA, 20 bp, Sus scrofa
ggcctattctctgctgctct

SEQ ID NO: 3482 - DNA, 20 bp, Sus scrofa
gccctgcctgatttaagagc

SEQ ID NO: 3483 - DNA, 20 bp, Sus scrofa
cttttacctgctcttaaatc

SEQ ID NO: 3484 - DNA, 20 bp, Sus scrofa
tacctgctcttaaatcaggc

SEQ ID NO: 3485 - DNA, 20 bp, Sus scrofa
acctgctcttaaatcaggca

SEQ ID NO: 3486 - DNA, 20 bp, Sus scrofa
ctcttaaatcaggcagggct

SEQ ID NO: 3487 - DNA, 20 bp, Sus scrofa
tcttaaatcaggcagggcta

SEQ ID NO: 3488 - DNA, 20 bp, Sus scrofa
aaatcaggcagggctagggc

SEQ ID NO: 3489 - DNA, 20 bp, Sus scrofa
ggcagggctagggcaggagc

SEQ ID NO: 3490 - DNA, 20 bp, Sus scrofa
gcagggctagggcaggagct

SEQ ID NO: 3491 - DNA, 20 bp, Sus scrofa
agggcaggagctgggcaatc

SEQ ID NO: 3492 - DNA, 20 bp, Sus scrofa
gggcaggagctgggcaatca

SEQ ID NO: 3493 - DNA, 20 bp, Sus scrofa
aggagctgggcaatcaggga

SEQ ID NO: 3494 - DNA, 20 bp, Sus scrofa
ggcaatcagggaaggcttcc

SEQ ID NO: 3495 - DNA, 20 bp, Sus scrofa
aatcagggaaggcttcctgg

SEQ ID NO: 3496 - DNA, 20 bp, Sus scrofa
cagggaaggcttcctggagg

SEQ ID NO: 3497 - DNA, 20 bp, Sus scrofa
cacttggcagttccacctcc

SEQ ID NO: 3498 - DNA, 20 bp, Sus scrofa
tctattctacttcagacact

SEQ ID NO: 3499 - DNA, 20 bp, Sus scrofa
aagtagaatagaatctagac

SEQ ID NO: 3500 - DNA, 20 bp, Sus scrofa
agaatagaatctagactggc

SEQ ID NO: 3501 - DNA, 20 bp, Sus scrofa
atctagactggctggaagag

SEQ ID NO: 3502 - DNA, 20 bp, Sus scrofa
ctggctggaagagaggaacg

SEQ ID NO: 3503 - DNA, 20 bp, Sus scrofa
gaagagaggaacgaggtttg

SEQ ID NO: 3504 - DNA, 20 bp, Sus scrofa
aagagaggaacgaggtttga

SEQ ID NO: 3505 - DNA, 20 bp, Sus scrofa
agagaggaacgaggtttgag

SEQ ID NO: 3506 - DNA, 20 bp, Sus scrofa
gaggaacgaggtttgagggg

SEQ ID NO: 3507 - DNA, 20 bp, Sus scrofa
gtttgaggggaggagagcaa

SEQ ID NO: 3508 - DNA, 20 bp, Sus scrofa
gagagcaaaggcatgacatg

SEQ ID NO: 3509 - DNA, 20 bp, Sus scrofa
agagcaaaggcatgacatga

SEQ ID NO: 3510 - DNA, 20 bp, Sus scrofa
gcaaaggcatgacatgaggg

SEQ ID NO: 3511 - DNA, 20 bp, Sus scrofa
caaaggcatgacatgaggga

SEQ ID NO: 3512 - DNA, 20 bp, Sus scrofa
aaaggcatgacatgagggag

SEQ ID NO: 3513 - DNA, 20 bp, Sus scrofa
cagtgagcctggcagagctt

SEQ ID NO: 3514 - DNA, 20 bp, Sus scrofa
ccagtgagcctggcagagct

SEQ ID NO: 3515 - DNA, 20 bp, Sus scrofa
ggaggggcccaagctctgcc

SEQ ID NO: 3516 - DNA, 20 bp, Sus scrofa
gcctgtttagccagtgagcc

SEQ ID NO: 3517 - DNA, 20 bp, Sus scrofa
ccaagctctgccaggctcac

SEQ ID NO: 3518 - DNA, 20 bp, Sus scrofa
gccaggctcactggctaaac

SEQ ID NO: 3519 - DNA, 20 bp, Sus scrofa
gggctttgggcttgtcagat

SEQ ID NO: 3520 - DNA, 20 bp, Sus scrofa
tgggctttgggcttgtcaga

SEQ ID NO: 3521 - DNA, 20 bp, Sus scrofa
tgctgtcggacctgggcttt

SEQ ID NO: 3522 - DNA, 20 bp, Sus scrofa
atctgacaagcccaaagccc

SEQ ID NO: 3523 - DNA, 20 bp, Sus scrofa
ttgctgtcggacctgggctt

SEQ ID NO: 3524 - DNA, 20 bp, Sus scrofa
gtgcaattgctgtcggacct

SEQ ID NO: 3525 - DNA, 20 bp, Sus scrofa
ggtgcaattgctgtcggacc

SEQ ID NO: 3526 - DNA, 20 bp, Sus scrofa
agaactggtgcaattgctgt

SEQ ID NO: 3527 - DNA, 20 bp, Sus scrofa
agactcagtaactcaagaac

SEQ ID NO: 3528 - DNA, 20 bp, Sus scrofa
agttactgagtctgttctac

SEQ ID NO: 3529 - DNA, 20 bp, Sus scrofa
tccactgcagatgcttcatc

SEQ ID NO: 3530 - DNA, 20 bp, Sus scrofa
gccagatgaagcatctgcag

SEQ ID NO: 3531 - DNA, 20 bp, Sus scrofa
cctcaccaagacagaggagc

SEQ ID NO: 3532 - DNA, 20 bp, Sus scrofa
tggaaccagctcctctgtct

SEQ ID NO: 3533 - DNA, 20 bp, Sus scrofa
tttctgcctcaccaagacag

SEQ ID NO: 3534 - DNA, 20 bp, Sus scrofa
ccagctcctctgtcttggtg

SEQ ID NO: 3535 - DNA, 20 bp, Sus scrofa
ccccaagcttgaggaggact

SEQ ID NO: 3536 - DNA, 20 bp, Sus scrofa
ctcctcccccaagcttgagg

SEQ ID NO: 3537 - DNA, 20 bp, Sus scrofa
aaccaagtcctcctcaagct

SEQ ID NO: 3538 - DNA, 20 bp, Sus scrofa
tacctcctcccccaagcttg

SEQ ID NO: 3539 - DNA, 20 bp, Sus scrofa
accaagtcctcctcaagctt

SEQ ID NO: 3540 - DNA, 20 bp, Sus scrofa
ccaagtcctcctcaagcttg

SEQ ID NO: 3541 - DNA, 20 bp, Sus scrofa
caagtcctcctcaagcttgg

SEQ ID NO: 3542 - DNA, 20 bp, Sus scrofa
gtcctcctcaagcttggggg

SEQ ID NO: 3543 - DNA, 20 bp, Sus scrofa
ctcctcaagcttgggggagg

SEQ ID NO: 3544 - DNA, 20 bp, Sus scrofa
tcaagcttgggggaggaggt

SEQ ID NO: 3545 - DNA, 20 bp, Sus scrofa
tgggggaggaggtaggaagc

SEQ ID NO: 3546 - DNA, 20 bp, Sus scrofa
ggaggtaggaagccggttcc

SEQ ID NO: 3547 - DNA, 20 bp, Sus scrofa
gctccctcgctgcctggaac

SEQ ID NO: 3548 - DNA, 20 bp, Sus scrofa
tgactggctccctcgctgcc

SEQ ID NO: 3549 - DNA, 20 bp, Sus scrofa
gaagccggttccaggcagcg

SEQ ID NO: 3550 - DNA, 20 bp, Sus scrofa
aagccggttccaggcagcga

SEQ ID NO: 3551 - DNA, 20 bp, Sus scrofa
gcagcgagggagccagtcac

SEQ ID NO: 3552 - DNA, 20 bp, Sus scrofa
cagcgagggagccagtcaca

SEQ ID NO: 3553 - DNA, 20 bp, Sus scrofa
attaacataaaccctgtgac

SEQ ID NO: 3554 - DNA, 20 bp, Sus scrofa
tcacagggtttatgttaata

SEQ ID NO: 3555 - DNA, 20 bp, Sus scrofa
cacagggtttatgttaatac

SEQ ID NO: 3556 - DNA, 20 bp, Sus scrofa
gctaagcgccggctggggga

SEQ ID NO: 3557 - DNA, 20 bp, Sus scrofa
ggctaagcgccggctggggg

SEQ ID NO: 3558 - DNA, 20 bp, Sus scrofa
aatacgggccctcccccagc

SEQ ID NO: 3559 - DNA, 20 bp, Sus scrofa
ataggctaagcgccggctgg

SEQ ID NO: 3560 - DNA, 20 bp, Sus scrofa
aataggctaagcgccggctg

SEQ ID NO: 3561 - DNA, 20 bp, Sus scrofa
taataggctaagcgccggct

SEQ ID NO: 3562 - DNA, 20 bp, Sus scrofa
gtaataggctaagcgccggc

SEQ ID NO: 3563 - DNA, 20 bp, Sus scrofa
ccgggtaataggctaagcgc

SEQ ID NO: 3564 - DNA, 20 bp, Sus scrofa
ccggcgcttagcctattacc

SEQ ID NO: 3565 - DNA, 20 bp, Sus scrofa
gtcggcagggcccgggtaat

SEQ ID NO: 3566 - DNA, 20 bp, Sus scrofa
cggcgcttagcctattaccc

SEQ ID NO: 3567 - DNA, 20 bp, Sus scrofa
ttaagctgtcggcagggccc

SEQ ID NO: 3568 - DNA, 20 bp, Sus scrofa
attaagctgtcggcagggcc

SEQ ID NO: 3569 - DNA, 20 bp, Sus scrofa
cggtaattaagctgtcggca

SEQ ID NO: 3570 - DNA, 20 bp, Sus scrofa
gcggtaattaagctgtcggc

SEQ ID NO: 3571 - DNA, 20 bp, Sus scrofa
tgcagcggtaattaagctgt

SEQ ID NO: 3572 - DNA, 20 bp, Sus scrofa
caggccgaggctcgctgcag

SEQ ID NO: 3573 - DNA, 20 bp, Sus scrofa
attaccgctgcagcgagcct

SEQ ID NO: 3574 - DNA, 20 bp, Sus scrofa
gaaccgtggagggcaggccg

SEQ ID NO: 3575 - DNA, 20 bp, Sus scrofa
tttagggaaccgtggagggc

SEQ ID NO: 3576 - DNA, 20 bp, Sus scrofa
gagcctcggcctgccctcca

SEQ ID NO: 3577 - DNA, 20 bp, Sus scrofa
ttattttagggaaccgtgga

SEQ ID NO: 3578 - DNA, 20 bp, Sus scrofa
attattttagggaaccgtgg

SEQ ID NO: 3579 - DNA, 20 bp, Sus scrofa
cttattattttagggaaccg

SEQ ID NO: 3580 - DNA, 20 bp, Sus scrofa
acgccatccttattatttta

SEQ ID NO: 3581 - DNA, 20 bp, Sus scrofa
gacgccatccttattatttt

SEQ ID NO: 3582 - DNA, 20 bp, Sus scrofa
cacggttccctaaaataata

SEQ ID NO: 3583 - DNA, 20 bp, Sus scrofa
gttccctaaaataataagga

SEQ ID NO: 3584 - DNA, 20 bp, Sus scrofa
agcacatggccgcgggaagt

SEQ ID NO: 3585 - DNA, 20 bp, Sus scrofa
atggcgtcaccgacttcccg

SEQ ID NO: 3586 - DNA, 20 bp, Sus scrofa
gggtgggagcacatggccgc

SEQ ID NO: 3587 - DNA, 20 bp, Sus scrofa
cgggtgggagcacatggccg

SEQ ID NO: 3588 - DNA, 20 bp, Sus scrofa
aaggcacgggtgggagcaca

SEQ ID NO: 3589 - DNA, 20 bp, Sus scrofa
agagctatgaaggcacgggt

SEQ ID NO: 3590 - DNA, 20 bp, Sus scrofa
tagagctatgaaggcacggg

SEQ ID NO: 3591 - DNA, 20 bp, Sus scrofa
caatagagctatgaaggcac

SEQ ID NO: 3592 - DNA, 20 bp, Sus scrofa
acaatagagctatgaaggca

SEQ ID NO: 3593 - DNA, 20 bp, Sus scrofa
ttcccacaatagagctatga

SEQ ID NO: 3594 - DNA, 20 bp, Sus scrofa
gtgccttcatagctctattg

SEQ ID NO: 3595 - DNA, 20 bp, Sus scrofa
tgccttcatagctctattgt

SEQ ID NO: 3596 - DNA, 20 bp, Sus scrofa
gaaaaaagcatctggatctc

SEQ ID NO: 3597 - DNA, 20 bp, Sus scrofa
atctccaagaaaaaagcatc

SEQ ID NO: 3598 - DNA, 20 bp, Sus scrofa
agatccagatgcttttttct

SEQ ID NO: 3599 - DNA, 20 bp, Sus scrofa
tttttcttggagattttttt

SEQ ID NO: 3600 - DNA, 20 bp, Sus scrofa
ttttcttggagatttttttt

SEQ ID NO: 3601 - DNA, 20 bp, Sus scrofa
tttcttggagattttttttg

SEQ ID NO: 3602 - DNA, 20 bp, Sus scrofa
ggagattttttttggggagc

SEQ ID NO: 3603 - DNA, 20 bp, Sus scrofa
gagattttttttggggagca

SEQ ID NO: 3604 - DNA, 20 bp, Sus scrofa
tggggagcagggttaaagta

SEQ ID NO: 3605 - DNA, 20 bp, Sus scrofa
ggagcagggttaaagtaagg

SEQ ID NO: 3606 - DNA, 20 bp, Sus scrofa
gagcagggttaaagtaaggt

SEQ ID NO: 3607 - DNA, 20 bp, Sus scrofa
gaaatcttaactacggggca

SEQ ID NO: 3608 - DNA, 20 bp, Sus scrofa
tgaaatcttaactacggggc

SEQ ID NO: 3609 - DNA, 20 bp, Sus scrofa
cttttgaaatcttaactacg

SEQ ID NO: 3610 - DNA, 20 bp, Sus scrofa
tcttttgaaatcttaactac

SEQ ID NO: 3611 - DNA, 20 bp, Sus scrofa
atcttttgaaatcttaacta

SEQ ID NO: 3612 - DNA, 20 bp, Sus scrofa
gatttcaaaagatctctaat

SEQ ID NO: 3613 - DNA, 20 bp, Sus scrofa
caaaagatctctaataggta

SEQ ID NO: 3614 - DNA, 20 bp, Sus scrofa
cctcagtggagctaagactc

SEQ ID NO: 3615 - DNA, 20 bp, Sus scrofa
cctgagtcttagctccactg

SEQ ID NO: 3616 - DNA, 20 bp, Sus scrofa
aggttattctgcaacctcag

SEQ ID NO: 3617 - DNA, 20 bp, Sus scrofa
ttttcgtttctgctaacagg

SEQ ID NO: 3618 - DNA, 20 bp, Sus scrofa
gctttttcgtttctgctaac

SEQ ID NO: 3619 - DNA, 20 bp, Sus scrofa
gcagaaacgaaaaagctgtg

SEQ ID NO: 3620 - DNA, 20 bp, Sus scrofa
aagctgtgtggttgattctg

SEQ ID NO: 3621 - DNA, 20 bp, Sus scrofa
ttgattctgtggtcctccac

SEQ ID NO: 3622 - DNA, 20 bp, Sus scrofa
tgattctgtggtcctccacc

SEQ ID NO: 3623 - DNA, 20 bp, Sus scrofa
gattctgtggtcctccaccg

SEQ ID NO: 3624 - DNA, 20 bp, Sus scrofa
gaaatcacagtccccggtgg

SEQ ID NO: 3625 - DNA, 20 bp, Sus scrofa
tcagaaatcacagtccccgg

SEQ ID NO: 3626 - DNA, 20 bp, Sus scrofa
taatcagaaatcacagtccc

SEQ ID NO: 3627 - DNA, 20 bp, Sus scrofa
gtgatttctgattagagcag

SEQ ID NO: 3628 - DNA, 20 bp, Sus scrofa
ttctgattagagcagtggtg

SEQ ID NO: 3629 - DNA, 20 bp, Sus scrofa
tggtgtggtgctgtgcagtg

SEQ ID NO: 3630 - DNA, 20 bp, Sus scrofa
tagcagagaatcacctatct

SEQ ID NO: 3631 - DNA, 20 bp, Sus scrofa
agcagagaatcacctatctc

SEQ ID NO: 3632 - DNA, 20 bp, Sus scrofa
gcagagaatcacctatctcg

SEQ ID NO: 3633 - DNA, 20 bp, Sus scrofa
gagcccaggaaccccgagat

SEQ ID NO: 3634 - DNA, 20 bp, Sus scrofa
atcacctatctcggggttcc

SEQ ID NO: 3635 - DNA, 20 bp, Sus scrofa
tcacctatctcggggttcct

SEQ ID NO: 3636 - DNA, 20 bp, Sus scrofa
ccagagttggcctagagccc

SEQ ID NO: 3637 - DNA, 20 bp, Sus scrofa
tctcggggttcctgggctct

SEQ ID NO: 3638 - DNA, 20 bp, Sus scrofa
cctgggctctaggccaactc

SEQ ID NO: 3639 - DNA, 20 bp, Sus scrofa
gaagaaacaaggtccagagt

SEQ ID NO: 3640 - DNA, 20 bp, Sus scrofa
ttttgctagaggaagaaaca

SEQ ID NO: 3641 - DNA, 20 bp, Sus scrofa
gttcagctctcttttgctag

SEQ ID NO: 3642 - DNA, 20 bp, Sus scrofa
acccacagtgtgcaaattgc

SEQ ID NO: 3643 - DNA, 20 bp, Sus scrofa
gaccagcaatttgcacactg

SEQ ID NO: 3644 - DNA, 20 bp, Sus scrofa
accagcaatttgcacactgt

SEQ ID NO: 3645 - DNA, 20 bp, Sus scrofa
tagaaaaaagtaattgtaac

SEQ ID NO: 3646 - DNA, 20 bp, Sus scrofa
agaaaaaagtaattgtaaca

SEQ ID NO: 3647 - DNA, 20 bp, Sus scrofa
gcacatttttgcatgtaaac

SEQ ID NO: 3648 - DNA, 20 bp, Sus scrofa
aaaatgtgcttactgagcca

SEQ ID NO: 3649 - DNA, 20 bp, Sus scrofa
aaataaatacatttacacct

SEQ ID NO: 3650 - DNA, 20 bp, Sus scrofa
tgtatttatttttttgactg

SEQ ID NO: 3651 - DNA, 20 bp, Sus scrofa
gtatttatttttttgactgt

SEQ ID NO: 3652 - DNA, 20 bp, Sus scrofa
atttttttgactgtgggcta

SEQ ID NO: 3653 - DNA, 20 bp, Sus scrofa
ttcgggatcatctaggtcag

SEQ ID NO: 3654 - DNA, 20 bp, Sus scrofa
aaaggccttcgggatcatct

SEQ ID NO: 3655 - DNA, 20 bp, Sus scrofa
actgacctagatgatcccga

SEQ ID NO: 3656 - DNA, 20 bp, Sus scrofa
tgaaagctagaaaggccttc

SEQ ID NO: 3657 - DNA, 20 bp, Sus scrofa
atgaaagctagaaaggcctt

SEQ ID NO: 3658 - DNA, 20 bp, Sus scrofa
ggacattatgaaagctagaa

SEQ ID NO: 3659 - DNA, 20 bp, Sus scrofa
aacaagtctgggagaaaatc

SEQ ID NO: 3660 - DNA, 20 bp, Sus scrofa
gttccatagggaacaagtct

SEQ ID NO: 3661 - DNA, 20 bp, Sus scrofa
ggttccatagggaacaagtc

SEQ ID NO: 3662 - DNA, 20 bp, Sus scrofa
tctcccagacttgttcccta

SEQ ID NO: 3663 - DNA, 20 bp, Sus scrofa
aaatcctgtcaggttccata

SEQ ID NO: 3664 - DNA, 20 bp, Sus scrofa
aaaatcctgtcaggttccat

SEQ ID NO: 3665 - DNA, 20 bp, Sus scrofa
tgttccctatggaacctgac

SEQ ID NO: 3666 - DNA, 20 bp, Sus scrofa
caaaactgaaaaatcctgtc

SEQ ID NO: 3667 - DNA, 20 bp, Sus scrofa
gttttgcttaggagtcagtg

SEQ ID NO: 3668 - DNA, 20 bp, Sus scrofa
tacaatctctagttttgctt

SEQ ID NO: 3669 - DNA, 20 bp, Sus scrofa
aagcaaaactagagattgta

SEQ ID NO: 3670 - DNA, 20 bp, Sus scrofa
ataggagggatagatgcttg

SEQ ID NO: 3671 - DNA, 20 bp, Sus scrofa
ctcccaggtgttcgatagga

SEQ ID NO: 3672 - DNA, 20 bp, Sus scrofa
cctcccaggtgttcgatagg

SEQ ID NO: 3673 - DNA, 20 bp, Sus scrofa
cttcctcccaggtgttcgat

SEQ ID NO: 3674 - DNA, 20 bp, Sus scrofa
tatccctcctatcgaacacc

SEQ ID NO: 3675 - DNA, 20 bp, Sus scrofa
atccctcctatcgaacacct

SEQ ID NO: 3676 - DNA, 20 bp, Sus scrofa
cctcctatcgaacacctggg

SEQ ID NO: 3677 - DNA, 20 bp, Sus scrofa
ggggagatgggcttcctccc

SEQ ID NO: 3678 - DNA, 20 bp, Sus scrofa
acaccaatgcagggggagat

SEQ ID NO: 3679 - DNA, 20 bp, Sus scrofa
gacaccaatgcagggggaga

SEQ ID NO: 3680 - DNA, 20 bp, Sus scrofa
gtctgagacaccaatgcagg

SEQ ID NO: 3681 - DNA, 20 bp, Sus scrofa
aagcccatctccccctgcat

SEQ ID NO: 3682 - DNA, 20 bp, Sus scrofa
tgtctgagacaccaatgcag

SEQ ID NO: 3683 - DNA, 20 bp, Sus scrofa
ctgtctgagacaccaatgca

SEQ ID NO: 3684 - DNA, 20 bp, Sus scrofa
actgtctgagacaccaatgc

SEQ ID NO: 3685 - DNA, 20 bp, Sus scrofa
cattggtgtctcagacagtt

SEQ ID NO: 3686 - DNA, 20 bp, Sus scrofa
agatcccatttctagcttga

SEQ ID NO: 3687 - DNA, 20 bp, Sus scrofa
tttggccttcaagctagaaa

SEQ ID NO: 3688 - DNA, 20 bp, Sus scrofa
ttggccttcaagctagaaat

SEQ ID NO: 3689 - DNA, 20 bp, Sus scrofa
ctagaaatgggatctgcaac

SEQ ID NO: 3690 - DNA, 20 bp, Sus scrofa
tagaaatgggatctgcaaca

SEQ ID NO: 3691 - DNA, 20 bp, Sus scrofa
agaaatgggatctgcaacag

SEQ ID NO: 3692 - DNA, 20 bp, Sus scrofa
atgggatctgcaacagggga

SEQ ID NO: 3693 - DNA, 20 bp, Sus scrofa
aaataggtcagtttttaaat

SEQ ID NO: 3694 - DNA, 20 bp, Sus scrofa
taaataggtcagtttttaaa

SEQ ID NO: 3695 - DNA, 20 bp, Sus scrofa
agtgctcatgggttttaaat

SEQ ID NO: 3696 - DNA, 20 bp, Sus scrofa
cgtgttttttcagtgctcat

SEQ ID NO: 3697 - DNA, 20 bp, Sus scrofa
ccgtgttttttcagtgctca

SEQ ID NO: 3698 - DNA, 20 bp, Sus scrofa
ccatgagcactgaaaaaaca

SEQ ID NO: 3699 - DNA, 20 bp, Sus scrofa
catgagcactgaaaaaacac

SEQ ID NO: 3700 - DNA, 20 bp, Sus scrofa
atgagcactgaaaaaacacg

SEQ ID NO: 3701 - DNA, 20 bp, Sus scrofa
gttgtcttcttttgcgaagc

SEQ ID NO: 3702 - DNA, 20 bp, Sus scrofa
ttgtcttcttttgcgaagct

SEQ ID NO: 3703 - DNA, 20 bp, Sus scrofa
ccccgaccaatttagctttc

SEQ ID NO: 3704 - DNA, 20 bp, Sus scrofa
ctgggacctgaaagctaaat

SEQ ID NO: 3705 - DNA, 20 bp, Sus scrofa
gacctgaaagctaaattggt

SEQ ID NO: 3706 - DNA, 20 bp, Sus scrofa
acctgaaagctaaattggtc

SEQ ID NO: 3707 - DNA, 20 bp, Sus scrofa
cctgaaagctaaattggtcg

SEQ ID NO: 3708 - DNA, 20 bp, Sus scrofa
aaattggtcggggactgaca

SEQ ID NO: 3709 - DNA, 20 bp, Sus scrofa
gcaataaatatttgtaactt

SEQ ID NO: 3710 - DNA, 20 bp, Sus scrofa
agttttttccactaaacttg

SEQ ID NO: 3711 - DNA, 20 bp, Sus scrofa
agatcaagcctcaagtttag

SEQ ID NO: 3712 - DNA, 20 bp, Sus scrofa
agtggaaaaaactacacaaa

SEQ ID NO: 3713 - DNA, 20 bp, Sus scrofa
ggaaaaaactacacaaaagg

SEQ ID NO: 3714 - DNA, 20 bp, Sus scrofa
aaactacacaaaaggaggtg

SEQ ID NO: 3715 - DNA, 20 bp, Sus scrofa
aactacacaaaaggaggtgt

SEQ ID NO: 3716 - DNA, 20 bp, Sus scrofa
gtgtgggtgtaaagtccagc

SEQ ID NO: 3717 - DNA, 20 bp, Sus scrofa
tgtgggtgtaaagtccagca

SEQ ID NO: 3718 - DNA, 20 bp, Sus scrofa
gtgcccagaatgcaccctgc

SEQ ID NO: 3719 - DNA, 20 bp, Sus scrofa
aagtccagcagggtgcattc

SEQ ID NO: 3720 - DNA, 20 bp, Sus scrofa
agtccagcagggtgcattct

SEQ ID NO: 3721 - DNA, 20 bp, Sus scrofa
cacattctggagagtgaaga

SEQ ID NO: 3722 - DNA, 20 bp, Sus scrofa
catcttcactctccagaatg

SEQ ID NO: 3723 - DNA, 20 bp, Sus scrofa
atgaaggcctctccacattc

SEQ ID NO: 3724 - DNA, 20 bp, Sus scrofa
tcactctccagaatgtggag

SEQ ID NO: 3725 - DNA, 20 bp, Sus scrofa
agagcttcttcatggaatga

SEQ ID NO: 3726 - DNA, 20 bp, Sus scrofa
ctgtctgcagagcttcttca

SEQ ID NO: 3727 - DNA, 20 bp, Sus scrofa
tgaagaagctctgcagacag

SEQ ID NO: 3728 - DNA, 20 bp, Sus scrofa
agaagctctgcagacagcgg

SEQ ID NO: 3729 - DNA, 20 bp, Sus scrofa
gcggaggtgactcagagctg

SEQ ID NO: 3730 - DNA, 20 bp, Sus scrofa
cggaggtgactcagagctgt

SEQ ID NO: 3731 - DNA, 20 bp, Sus scrofa
tcagagctgtgggcctgcct

SEQ ID NO: 3732 - DNA, 20 bp, Sus scrofa
acaagaatgggaaccaaggc

SEQ ID NO: 3733 - DNA, 20 bp, Sus scrofa
aggcacaagaatgggaacca

SEQ ID NO: 3734 - DNA, 20 bp, Sus scrofa
tgcagtcaaggcacaagaat

SEQ ID NO: 3735 - DNA, 20 bp, Sus scrofa
ctgcagtcaaggcacaagaa

SEQ ID NO: 3736 - DNA, 20 bp, Sus scrofa
cactgctgcgtctgcagtca

SEQ ID NO: 3737 - DNA, 20 bp, Sus scrofa
gactgcagacgcagcagtga

SEQ ID NO: 3738 - DNA, 20 bp, Sus scrofa
tgcagacgcagcagtgaagg

SEQ ID NO: 3739 - DNA, 20 bp, Sus scrofa
aaggtggctgtgcattgaga

SEQ ID NO: 3740 - DNA, 20 bp, Sus scrofa
tggctgtgcattgagaaggc

SEQ ID NO: 3741 - DNA, 20 bp, Sus scrofa
ctgtgcattgagaaggcagg

SEQ ID NO: 3742 - DNA, 20 bp, Sus scrofa
aaggcaggtggctttttcca

SEQ ID NO: 3743 - DNA, 20 bp, Sus scrofa
gcaggtggctttttccaagg

SEQ ID NO: 3744 - DNA, 20 bp, Sus scrofa
caggtggctttttccaaggt

SEQ ID NO: 3745 - DNA, 20 bp, Sus scrofa
aggtggctttttccaaggtg

SEQ ID NO: 3746 - DNA, 20 bp, Sus scrofa
ggtggctttttccaaggtgg

SEQ ID NO: 3747 - DNA, 20 bp, Sus scrofa
cacttagagcacccccacct

SEQ ID NO: 3748 - DNA, 20 bp, Sus scrofa
gtttaatttaatccaacccc

SEQ ID NO: 3749 - DNA, 20 bp, Sus scrofa
tagtgcccatcacctggggt

SEQ ID NO: 3750 - DNA, 20 bp, Sus scrofa
accatagtgcccatcacctg

SEQ ID NO: 3751 - DNA, 20 bp, Sus scrofa
tttaatccaaccccaggtga

SEQ ID NO: 3752 - DNA, 20 bp, Sus scrofa
gaccatagtgcccatcacct

SEQ ID NO: 3753 - DNA, 20 bp, Sus scrofa
ttaatccaaccccaggtgat

SEQ ID NO: 3754 - DNA, 20 bp, Sus scrofa
tgaccatagtgcccatcacc

SEQ ID NO: 3755 - DNA, 20 bp, Sus scrofa
accccaggtgatgggcacta

SEQ ID NO: 3756 - DNA, 20 bp, Sus scrofa
gtgatgggcactatggtcat

SEQ ID NO: 3757 - DNA, 20 bp, Sus scrofa
atgggcactatggtcattgg

SEQ ID NO: 3758 - DNA, 20 bp, Sus scrofa
actatggtcattggaggaag

SEQ ID NO: 3759 - DNA, 20 bp, Sus scrofa
ggaggaagcggaagcttcag

SEQ ID NO: 3760 - DNA, 20 bp, Sus scrofa
gaggtgagatgagcttgcag

SEQ ID NO: 3761 - DNA, 20 bp, Sus scrofa
aggtgagatgagcttgcagt

SEQ ID NO: 3762 - DNA, 20 bp, Sus scrofa
ggtgagatgagcttgcagtg

SEQ ID NO: 3763 - DNA, 20 bp, Sus scrofa
tgagcttgcagtggggaatt

SEQ ID NO: 3764 - DNA, 20 bp, Sus scrofa
gagcttgcagtggggaattt

SEQ ID NO: 3765 - DNA, 20 bp, Sus scrofa
gctctggagtcagacagatc

SEQ ID NO: 3766 - DNA, 20 bp, Sus scrofa
ggtggacagaaggcaggctc

SEQ ID NO: 3767 - DNA, 20 bp, Sus scrofa
tggagaggtggacagaaggc

SEQ ID NO: 3768 - DNA, 20 bp, Sus scrofa
aaggtggagaggtggacaga

SEQ ID NO: 3769 - DNA, 20 bp, Sus scrofa
gctgaggcaaggtggagagg

SEQ ID NO: 3770 - DNA, 20 bp, Sus scrofa
cttgctgaggcaaggtggag

SEQ ID NO: 3771 - DNA, 20 bp, Sus scrofa
cagcacttgctgaggcaagg

SEQ ID NO: 3772 - DNA, 20 bp, Sus scrofa
ttccagcacttgctgaggca

SEQ ID NO: 3773 - DNA, 20 bp, Sus scrofa
tatttttccagcacttgctg

SEQ ID NO: 3774 - DNA, 20 bp, Sus scrofa
caccttgcctcagcaagtgc

SEQ ID NO: 3775 - DNA, 20 bp, Sus scrofa
ctcttcagtttccttctctc

SEQ ID NO: 3776 - DNA, 20 bp, Sus scrofa
gaagaccagcaccagagaga

SEQ ID NO: 3777 - DNA, 20 bp, Sus scrofa
agtttccttctctctggtgc

SEQ ID NO: 3778 - DNA, 20 bp, Sus scrofa
tctctggtgctggtcttccg

SEQ ID NO: 3779 - DNA, 20 bp, Sus scrofa
ctctggtgctggtcttccga

SEQ ID NO: 3780 - DNA, 20 bp, Sus scrofa
tgggcctaaagcagagccct

SEQ ID NO: 3781 - DNA, 20 bp, Sus scrofa
tcttccgagggctctgcttt

SEQ ID NO: 3782 - DNA, 20 bp, Sus scrofa
ccgatttaaatggacagcat

SEQ ID NO: 3783 - DNA, 20 bp, Sus scrofa
cccgatttaaatggacagca

SEQ ID NO: 3784 - DNA, 20 bp, Sus scrofa
gacgctagccccgatttaaa

SEQ ID NO: 3785 - DNA, 20 bp, Sus scrofa
cccatgctgtccatttaaat

SEQ ID NO: 3786 - DNA, 20 bp, Sus scrofa
ccatgctgtccatttaaatc

SEQ ID NO: 3787 - DNA, 20 bp, Sus scrofa
catgctgtccatttaaatcg

SEQ ID NO: 3788 - DNA, 20 bp, Sus scrofa
ttaaatcggggctagcgtca

SEQ ID NO: 3789 - DNA, 20 bp, Sus scrofa
taaatcggggctagcgtcac

SEQ ID NO: 3790 - DNA, 20 bp, Sus scrofa
gtgggcctgtgtgactgcac

SEQ ID NO: 3791 - DNA, 20 bp, Sus scrofa
tgtgacctgtgcagtcacac

SEQ ID NO: 3792 - DNA, 20 bp, Sus scrofa
gggagggacccgctaggtgt

SEQ ID NO: 3793 - DNA, 20 bp, Sus scrofa
agggagggacccgctaggtg

SEQ ID NO: 3794 - DNA, 20 bp, Sus scrofa
tcacacaggcccacacctag

SEQ ID NO: 3795 - DNA, 20 bp, Sus scrofa
cacacaggcccacacctagc

SEQ ID NO: 3796 - DNA, 20 bp, Sus scrofa
agagcagggagggacccgct

SEQ ID NO: 3797 - DNA, 20 bp, Sus scrofa
gttaaacccaagagcaggga

SEQ ID NO: 3798 - DNA, 20 bp, Sus scrofa
tgttaaacccaagagcaggg

SEQ ID NO: 3799 - DNA, 20 bp, Sus scrofa
agcgggtccctccctgctct

SEQ ID NO: 3800 - DNA, 20 bp, Sus scrofa
gcatgttaaacccaagagca

SEQ ID NO: 3801 - DNA, 20 bp, Sus scrofa
gcgggtccctccctgctctt

SEQ ID NO: 3802 - DNA, 20 bp, Sus scrofa
agcatgttaaacccaagagc

SEQ ID NO: 3803 - DNA, 20 bp, Sus scrofa
acatgctactgtccctgtct

SEQ ID NO: 3804 - DNA, 20 bp, Sus scrofa
cgataaagaattccaagaca

SEQ ID NO: 3805 - DNA, 20 bp, Sus scrofa
acgataaagaattccaagac

SEQ ID NO: 3806 - DNA, 20 bp, Sus scrofa
attctttatcgtccttgagc

SEQ ID NO: 3807 - DNA, 20 bp, Sus scrofa
aatgtgagaccacctgctca

SEQ ID NO: 3808 - DNA, 20 bp, Sus scrofa
ctttatcgtccttgagcagg

SEQ ID NO: 3809 - DNA, 20 bp, Sus scrofa
ctcacatttgcattttgcac

SEQ ID NO: 3810 - DNA, 20 bp, Sus scrofa
tcacatttgcattttgcact

SEQ ID NO: 3811 - DNA, 20 bp, Sus scrofa
agttggacaggtaacttgca

SEQ ID NO: 3812 - DNA, 20 bp, Sus scrofa
gagttggacaggtaacttgc

SEQ ID NO: 3813 - DNA, 20 bp, Sus scrofa
cagcaaagccagagttggac

SEQ ID NO: 3814 - DNA, 20 bp, Sus scrofa
gcaagttacctgtccaactc

SEQ ID NO: 3815 - DNA, 20 bp, Sus scrofa
ccttacagcaaagccagagt

SEQ ID NO: 3816 - DNA, 20 bp, Sus scrofa
ccaactctggctttgctgta

SEQ ID NO: 3817 - DNA, 20 bp, Sus scrofa
cccagaaagaccaagaaaag

SEQ ID NO: 3818 - DNA, 20 bp, Sus scrofa
ctgtaaggcaccccttttct

SEQ ID NO: 3819 - DNA, 20 bp, Sus scrofa
ccccagaaagaccaagaaaa

SEQ ID NO: 3820 - DNA, 20 bp, Sus scrofa
gccccagaaagaccaagaaa

SEQ ID NO: 3821 - DNA, 20 bp, Sus scrofa
accccttttcttggtctttc

SEQ ID NO: 3822 - DNA, 20 bp, Sus scrofa
ccccttttcttggtctttct

SEQ ID NO: 3823 - DNA, 20 bp, Sus scrofa
cccttttcttggtctttctg

SEQ ID NO: 3824 - DNA, 20 bp, Sus scrofa
aacgttccgggcagatagga

SEQ ID NO: 3825 - DNA, 20 bp, Sus scrofa
gaacgttccgggcagatagg

SEQ ID NO: 3826 - DNA, 20 bp, Sus scrofa
tgggaacgttccgggcagat

SEQ ID NO: 3827 - DNA, 20 bp, Sus scrofa
ctggggccctcctatctgcc

SEQ ID NO: 3828 - DNA, 20 bp, Sus scrofa
ggggaggatgggaacgttcc

SEQ ID NO: 3829 - DNA, 20 bp, Sus scrofa
tggggaggatgggaacgttc

SEQ ID NO: 3830 - DNA, 20 bp, Sus scrofa
tgcctctacctggggaggat

SEQ ID NO: 3831 - DNA, 20 bp, Sus scrofa
atgcctctacctggggagga

SEQ ID NO: 3832 - DNA, 20 bp, Sus scrofa
ggaacgttcccatcctcccc

SEQ ID NO: 3833 - DNA, 20 bp, Sus scrofa
tcacatgcctctacctgggg

SEQ ID NO: 3834 - DNA, 20 bp, Sus scrofa
gcttcacatgcctctacctg

SEQ ID NO: 3835 - DNA, 20 bp, Sus scrofa
ttcccatcctccccaggtag

SEQ ID NO: 3836 - DNA, 20 bp, Sus scrofa
tgcttcacatgcctctacct

SEQ ID NO: 3837 - DNA, 20 bp, Sus scrofa
gtgcttcacatgcctctacc

SEQ ID NO: 3838 - DNA, 20 bp, Sus scrofa
aggcccaaggctggggtggg

SEQ ID NO: 3839 - DNA, 20 bp, Sus scrofa
caggcccaaggctggggtgg

SEQ ID NO: 3840 - DNA, 20 bp, Sus scrofa
gcaggcccaaggctggggtg

SEQ ID NO: 3841 - DNA, 20 bp, Sus scrofa
agcaggcccaaggctggggt

SEQ ID NO: 3842 - DNA, 20 bp, Sus scrofa
tagcaggcccaaggctgggg

SEQ ID NO: 3843 - DNA, 20 bp, Sus scrofa
cacaccccccaccccagcct

SEQ ID NO: 3844 - DNA, 20 bp, Sus scrofa
agatagcaggcccaaggctg

SEQ ID NO: 3845 - DNA, 20 bp, Sus scrofa
acaccccccaccccagcctt

SEQ ID NO: 3846 - DNA, 20 bp, Sus scrofa
cagatagcaggcccaaggct

SEQ ID NO: 3847 - DNA, 20 bp, Sus scrofa
ccagatagcaggcccaaggc

SEQ ID NO: 3848 - DNA, 20 bp, Sus scrofa
tgtgccagatagcaggccca

SEQ ID NO: 3849 - DNA, 20 bp, Sus scrofa
ccagccttgggcctgctatc

SEQ ID NO: 3850 - DNA, 20 bp, Sus scrofa
agtccagtgtgccagatagc

SEQ ID NO: 3851 - DNA, 20 bp, Sus scrofa
gggcctgctatctggcacac

SEQ ID NO: 3852 - DNA, 20 bp, Sus scrofa
gcaagaaagagacagacagc

SEQ ID NO: 3853 - DNA, 20 bp, Sus scrofa
ccagcaagtggggtggtggc

SEQ ID NO: 3854 - DNA, 20 bp, Sus scrofa
cttgccagcaagtggggtgg

SEQ ID NO: 3855 - DNA, 20 bp, Sus scrofa
gtccttgccagcaagtgggg

SEQ ID NO: 3856 - DNA, 20 bp, Sus scrofa
ggggtccttgccagcaagtg

SEQ ID NO: 3857 - DNA, 20 bp, Sus scrofa
cctgccaccaccccacttgc

SEQ ID NO: 3858 - DNA, 20 bp, Sus scrofa
tggggtccttgccagcaagt

SEQ ID NO: 3859 - DNA, 20 bp, Sus scrofa
ttggggtccttgccagcaag

SEQ ID NO: 3860 - DNA, 20 bp, Sus scrofa
caccaccccacttgctggca

SEQ ID NO: 3861 - DNA, 20 bp, Sus scrofa
gctggcaaggaccccaactg

SEQ ID NO: 3862 - DNA, 20 bp, Sus scrofa
gtgacggtgagccacagttg

SEQ ID NO: 3863 - DNA, 20 bp, Sus scrofa
ggtgacggtgagccacagtt

SEQ ID NO: 3864 - DNA, 20 bp, Sus scrofa
aggtgacggtgagccacagt

SEQ ID NO: 3865 - DNA, 20 bp, Sus scrofa
gaggggagacacagaggtga

SEQ ID NO: 3866 - DNA, 20 bp, Sus scrofa
gcagctgaggggagacacag

SEQ ID NO: 3867 - DNA, 20 bp, Sus scrofa
tgtccatctgagcagctgag

SEQ ID NO: 3868 - DNA, 20 bp, Sus scrofa
ctgtccatctgagcagctga

SEQ ID NO: 3869 - DNA, 20 bp, Sus scrofa
actgtccatctgagcagctg

SEQ ID NO: 3870 - DNA, 20 bp, Sus scrofa
tctcccctcagctgctcaga

SEQ ID NO: 3871 - DNA, 20 bp, Sus scrofa
gctcagatggacagtgtcac

SEQ ID NO: 3872 - DNA, 20 bp, Sus scrofa
ggagctcactgtgtgaagag

SEQ ID NO: 3873 - DNA, 20 bp, Sus scrofa
gagctcactgtgtgaagaga

SEQ ID NO: 3874 - DNA, 20 bp, Sus scrofa
agctcactgtgtgaagagag

SEQ ID NO: 3875 - DNA, 20 bp, Sus scrofa
acccagtgctctctgcacac

SEQ ID NO: 3876 - DNA, 20 bp, Sus scrofa
gacctgtgtgcagagagcac

SEQ ID NO: 3877 - DNA, 20 bp, Sus scrofa
acctgtgtgcagagagcact

SEQ ID NO: 3878 - DNA, 20 bp, Sus scrofa
tgtgcagagagcactgggtc

SEQ ID NO: 3879 - DNA, 20 bp, Sus scrofa
gagcactgggtcaggtcaag

SEQ ID NO: 3880 - DNA, 20 bp, Sus scrofa
cactgggtcaggtcaagagg

SEQ ID NO: 3881 - DNA, 20 bp, Sus scrofa
gcataatcccataaggaggc

SEQ ID NO: 3882 - DNA, 20 bp, Sus scrofa
actgctgacctgcctcctta

SEQ ID NO: 3883 - DNA, 20 bp, Sus scrofa
ctgctgacctgcctccttat

SEQ ID NO: 3884 - DNA, 20 bp, Sus scrofa
acaagcataatcccataagg

SEQ ID NO: 3885 - DNA, 20 bp, Sus scrofa
gagacaagcataatcccata

SEQ ID NO: 3886 - DNA, 20 bp, Sus scrofa
tatgggattatgcttgtctc

SEQ ID NO: 3887 - DNA, 20 bp, Sus scrofa
atgggattatgcttgtctca

SEQ ID NO: 3888 - DNA, 20 bp, Sus scrofa
acaaaaacaactactacttc

SEQ ID NO: 3889 - DNA, 20 bp, Sus scrofa
gttgtttttgtttgtaaaaa

SEQ ID NO: 3890 - DNA, 20 bp, Sus scrofa
ttgtttttgtttgtaaaaaa

SEQ ID NO: 3891 - DNA, 20 bp, Sus scrofa
tttttgtttgtaaaaaaggg

SEQ ID NO: 3892 - DNA, 20 bp, Sus scrofa
ttttgtttgtaaaaaaggga

SEQ ID NO: 3893 - DNA, 20 bp, Sus scrofa
agggcttgttcaacctgttt

SEQ ID NO: 3894 - DNA, 20 bp, Sus scrofa
cagtgcaactggtccaaaac

SEQ ID NO: 3895 - DNA, 20 bp, Sus scrofa
agtgaaactttcagtgcaac

SEQ ID NO: 3896 - DNA, 20 bp, Sus scrofa
agttgcactgaaagtttcac

SEQ ID NO: 3897 - DNA, 20 bp, Sus scrofa
tgcactgaaagtttcactgg

SEQ ID NO: 3898 - DNA, 20 bp, Sus scrofa
ttaggtgcccagcatacaga

SEQ ID NO: 3899 - DNA, 20 bp, Sus scrofa
attaggtgcccagcatacag

SEQ ID NO: 3900 - DNA, 20 bp, Sus scrofa
gtttgtctccctctgtatgc

SEQ ID NO: 3901 - DNA, 20 bp, Sus scrofa
tttgtctccctctgtatgct

SEQ ID NO: 3902 - DNA, 20 bp, Sus scrofa
attgtgccagccacaacatt

SEQ ID NO: 3903 - DNA, 20 bp, Sus scrofa
atgctgggcacctaatgttg

SEQ ID NO: 3904 - DNA, 20 bp, Sus scrofa
tgggcacctaatgttgtggc

SEQ ID NO: 3905 - DNA, 20 bp, Sus scrofa
ttgtggctggcacaataaag

SEQ ID NO: 3906 - DNA, 20 bp, Sus scrofa
aataaagaggacatttgtta

SEQ ID NO: 3907 - DNA, 20 bp, Sus scrofa
gacatttgttaaggagttga

SEQ ID NO: 3908 - DNA, 20 bp, Sus scrofa
acatttgttaaggagttgat

SEQ ID NO: 3909 - DNA, 20 bp, Sus scrofa
gtaatcagcctagcggggag

SEQ ID NO: 3910 - DNA, 20 bp, Sus scrofa
atgggtgtccactccccgct

SEQ ID NO: 3911 - DNA, 20 bp, Sus scrofa
tctctgtaatcagcctagcg

SEQ ID NO: 3912 - DNA, 20 bp, Sus scrofa
ttctctgtaatcagcctagc

SEQ ID NO: 3913 - DNA, 20 bp, Sus scrofa
cttctctgtaatcagcctag

SEQ ID NO: 3914 - DNA, 20 bp, Sus scrofa
cgctaggctgattacagaga

SEQ ID NO: 3915 - DNA, 20 bp, Sus scrofa
tccgatcctcctagaggtca

SEQ ID NO: 3916 - DNA, 20 bp, Sus scrofa
atccgatcctcctagaggtc

SEQ ID NO: 3917 - DNA, 20 bp, Sus scrofa
aaggacagtccctgacctct

SEQ ID NO: 3918 - DNA, 20 bp, Sus scrofa
gacagtccctgacctctagg

SEQ ID NO: 3919 - DNA, 20 bp, Sus scrofa
taagcatccgatcctcctag

SEQ ID NO: 3920 - DNA, 20 bp, Sus scrofa
tccctgacctctaggaggat

SEQ ID NO: 3921 - DNA, 20 bp, Sus scrofa
attcatgcagcagctgccct

SEQ ID NO: 3922 - DNA, 20 bp, Sus scrofa
tgcgcatcccggggcaccaa

SEQ ID NO: 3923 - DNA, 20 bp, Sus scrofa
ctgcgcatcccggggcacca

SEQ ID NO: 3924 - DNA, 20 bp, Sus scrofa
agcagctgcccttggtgccc

SEQ ID NO: 3925 - DNA, 20 bp, Sus scrofa
gcagctgcccttggtgcccc

SEQ ID NO: 3926 - DNA, 20 bp, Sus scrofa
agccagctctgcgcatcccg

SEQ ID NO: 3927 - DNA, 20 bp, Sus scrofa
cagccagctctgcgcatccc

SEQ ID NO: 3928 - DNA, 20 bp, Sus scrofa
gcagccagctctgcgcatcc

SEQ ID NO: 3929 - DNA, 20 bp, Sus scrofa
tgccccgggatgcgcagagc

SEQ ID NO: 3930 - DNA, 20 bp, Sus scrofa
tgcgcagagctggctgcaga

SEQ ID NO: 3931 - DNA, 20 bp, Sus scrofa
gctggctgcagaaggctttc

SEQ ID NO: 3932 - DNA, 20 bp, Sus scrofa
ctggctgcagaaggctttct

SEQ ID NO: 3933 - DNA, 20 bp, Sus scrofa
tggctgcagaaggctttctg

SEQ ID NO: 3934 - DNA, 20 bp, Sus scrofa
ctgcagaaggctttctgggg

SEQ ID NO: 3935 - DNA, 20 bp, Sus scrofa
tgcagaaggctttctgggga

SEQ ID NO: 3936 - DNA, 20 bp, Sus scrofa
gcagaaggctttctggggag

SEQ ID NO: 3937 - DNA, 20 bp, Sus scrofa
cagaaggctttctggggagg

SEQ ID NO: 3938 - DNA, 20 bp, Sus scrofa
gggggcttaactagagctaa

SEQ ID NO: 3939 - DNA, 20 bp, Sus scrofa
gcttaactagagctaaaggc

SEQ ID NO: 3940 - DNA, 20 bp, Sus scrofa
cttaactagagctaaaggca

SEQ ID NO: 3941 - DNA, 20 bp, Sus scrofa
ttaactagagctaaaggcag

SEQ ID NO: 3942 - DNA, 20 bp, Sus scrofa
gagctaaaggcaggggtgag

SEQ ID NO: 3943 - DNA, 20 bp, Sus scrofa
ctaaaggcaggggtgagagg

SEQ ID NO: 3944 - DNA, 20 bp, Sus scrofa
taaaggcaggggtgagaggt

SEQ ID NO: 3945 - DNA, 20 bp, Sus scrofa
aaaggcaggggtgagaggtg

SEQ ID NO: 3946 - DNA, 20 bp, Sus scrofa
gaggtggggtgtgaagagat

SEQ ID NO: 3947 - DNA, 20 bp, Sus scrofa
gtggggtgtgaagagattgg

SEQ ID NO: 3948 - DNA, 20 bp, Sus scrofa
tgaagagattggtggacatg

SEQ ID NO: 3949 - DNA, 20 bp, Sus scrofa
gaagagattggtggacatga

SEQ ID NO: 3950 - DNA, 20 bp, Sus scrofa
agattggtggacatgagggc

SEQ ID NO: 3951 - DNA, 20 bp, Sus scrofa
ttggtggacatgagggcagg

SEQ ID NO: 3952 - DNA, 20 bp, Sus scrofa
caagagtgaaagacctcctt

SEQ ID NO: 3953 - DNA, 20 bp, Sus scrofa
ggtcccaaacggacctaagg

SEQ ID NO: 3954 - DNA, 20 bp, Sus scrofa
caaggtcccaaacggaccta

SEQ ID NO: 3955 - DNA, 20 bp, Sus scrofa
aagacctccttaggtccgtt

SEQ ID NO: 3956 - DNA, 20 bp, Sus scrofa
agacctccttaggtccgttt

SEQ ID NO: 3957 - DNA, 20 bp, Sus scrofa
aaaatcatcaaggtcccaaa

SEQ ID NO: 3958 - DNA, 20 bp, Sus scrofa
gggggggaaaaaaatcatca

SEQ ID NO: 3959 - DNA, 20 bp, Sus scrofa
ttgatgatttttttcccccc

SEQ ID NO: 3960 - DNA, 20 bp, Sus scrofa
atgatttttttcccccccgg

SEQ ID NO: 3961 - DNA, 20 bp, Sus scrofa
gcttcctgttgcctccgggg

SEQ ID NO: 3962 - DNA, 20 bp, Sus scrofa
ggcttcctgttgcctccggg

SEQ ID NO: 3963 - DNA, 20 bp, Sus scrofa
tggcttcctgttgcctccgg

SEQ ID NO: 3964 - DNA, 20 bp, Sus scrofa
ctggcttcctgttgcctccg

SEQ ID NO: 3965 - DNA, 20 bp, Sus scrofa
cctggcttcctgttgcctcc

SEQ ID NO: 3966 - DNA, 20 bp, Sus scrofa
tcctggcttcctgttgcctc

SEQ ID NO: 3967 - DNA, 20 bp, Sus scrofa
ttttcccccccggaggcaac

SEQ ID NO: 3968 - DNA, 20 bp, Sus scrofa
cccggaggcaacaggaagcc

SEQ ID NO: 3969 - DNA, 20 bp, Sus scrofa
tctggcctagaaaacattcc

SEQ ID NO: 3970 - DNA, 20 bp, Sus scrofa
ggaagccaggaatgttttct

SEQ ID NO: 3971 - DNA, 20 bp, Sus scrofa
aacctataaagtgcaaactc

SEQ ID NO: 3972 - DNA, 20 bp, Sus scrofa
ggccagagtttgcactttat

SEQ ID NO: 3973 - DNA, 20 bp, Sus scrofa
gcctcacagaaaggggacga

SEQ ID NO: 3974 - DNA, 20 bp, Sus scrofa
aggatctgcctcacagaaag

SEQ ID NO: 3975 - DNA, 20 bp, Sus scrofa
caggatctgcctcacagaaa

SEQ ID NO: 3976 - DNA, 20 bp, Sus scrofa
tcaggatctgcctcacagaa

SEQ ID NO: 3977 - DNA, 20 bp, Sus scrofa
accatcgtcccctttctgtg

SEQ ID NO: 3978 - DNA, 20 bp, Sus scrofa
gactctctccccgaggtctc

SEQ ID NO: 3979 - DNA, 20 bp, Sus scrofa
tgaggcagatcctgagacct

SEQ ID NO: 3980 - DNA, 20 bp, Sus scrofa
gaggcagatcctgagacctc

SEQ ID NO: 3981 - DNA, 20 bp, Sus scrofa
aggcagatcctgagacctcg

SEQ ID NO: 3982 - DNA, 20 bp, Sus scrofa
tgaccctgactctctccccg

SEQ ID NO: 3983 - DNA, 20 bp, Sus scrofa
gagacctcggggagagagtc

SEQ ID NO: 3984 - DNA, 20 bp, Sus scrofa
agacctcggggagagagtca

SEQ ID NO: 3985 - DNA, 20 bp, Sus scrofa
tcagggtcattcagccagcc

SEQ ID NO: 3986 - DNA, 20 bp, Sus scrofa
cctggaggccaaggcctggc

SEQ ID NO: 3987 - DNA, 20 bp, Sus scrofa
tcattcagccagccaggcct

SEQ ID NO: 3988 - DNA, 20 bp, Sus scrofa
ttgacctggaggccaaggcc

SEQ ID NO: 3989 - DNA, 20 bp, Sus scrofa
aggccttgacctggaggcca

SEQ ID NO: 3990 - DNA, 20 bp, Sus scrofa
ccagccaggccttggcctcc

SEQ ID NO: 3991 - DNA, 20 bp, Sus scrofa
gggaacaggccttgacctgg

SEQ ID NO: 3992 - DNA, 20 bp, Sus scrofa
aggccttggcctccaggtca

SEQ ID NO: 3993 - DNA, 20 bp, Sus scrofa
agagggaacaggccttgacc

SEQ ID NO: 3994 - DNA, 20 bp, Sus scrofa
gtctccatgacagagggaac

SEQ ID NO: 3995 - DNA, 20 bp, Sus scrofa
aatggggtctccatgacaga

SEQ ID NO: 3996 - DNA, 20 bp, Sus scrofa
aaggcctgttccctctgtca

SEQ ID NO: 3997 - DNA, 20 bp, Sus scrofa
aaatggggtctccatgacag

SEQ ID NO: 3998 - DNA, 20 bp, Sus scrofa
tctgtcatggagaccccatt

SEQ ID NO: 3999 - DNA, 20 bp, Sus scrofa
tctgcctctgcttccaaatg

SEQ ID NO: 4000 - DNA, 20 bp, Sus scrofa
gtctgcctctgcttccaaat

SEQ ID NO: 4001 - DNA, 20 bp, Sus scrofa
ggtctgcctctgcttccaaa

SEQ ID NO: 4002 - DNA, 20 bp, Sus scrofa
gagaccccatttggaagcag

SEQ ID NO: 4003 - DNA, 20 bp, Sus scrofa
ttggaagcagaggcagacct

SEQ ID NO: 4004 - DNA, 20 bp, Sus scrofa
tggaagcagaggcagaccta

SEQ ID NO: 4005 - DNA, 20 bp, Sus scrofa
atggtcatctaagacaccct

SEQ ID NO: 4006 - DNA, 20 bp, Sus scrofa
cggcactgcagtcttggtca

SEQ ID NO: 4007 - DNA, 20 bp, Sus scrofa
tgctgccggcactgcagtct

SEQ ID NO: 4008 - DNA, 20 bp, Sus scrofa
catgaccaagactgcagtgc

SEQ ID NO: 4009 - DNA, 20 bp, Sus scrofa
tgaccattcctctctgctgc

SEQ ID NO: 4010 - DNA, 20 bp, Sus scrofa
ctgcagtgccggcagcagag

SEQ ID NO: 4011 - DNA, 20 bp, Sus scrofa
gtgccggcagcagagaggaa

SEQ ID NO: 4012 - DNA, 20 bp, Sus scrofa
ccgtcgcttgtttcaaaact

SEQ ID NO: 4013 - DNA, 20 bp, Sus scrofa
cccgtcgcttgtttcaaaac

SEQ ID NO: 4014 - DNA, 20 bp, Sus scrofa
cccagttttgaaacaagcga

SEQ ID NO: 4015 - DNA, 20 bp, Sus scrofa
ccagttttgaaacaagcgac

SEQ ID NO: 4016 - DNA, 20 bp, Sus scrofa
agcgacgggttgttccttag

SEQ ID NO: 4017 - DNA, 20 bp, Sus scrofa
caccaacacactatcctcta

SEQ ID NO: 4018 - DNA, 20 bp, Sus scrofa
ttccttagaggatagtgtgt

SEQ ID NO: 4019 - DNA, 20 bp, Sus scrofa
tagtgtgttggtgtttatca

SEQ ID NO: 4020 - DNA, 20 bp, Sus scrofa
agcagccatttctcatcaag

SEQ ID NO: 4021 - DNA, 20 bp, Sus scrofa
cagcagccatttctcatcaa

SEQ ID NO: 4022 - DNA, 20 bp, Sus scrofa
acagcagccatttctcatca

SEQ ID NO: 4023 - DNA, 20 bp, Sus scrofa
cagctccccttgatgagaaa

SEQ ID NO: 4024 - DNA, 20 bp, Sus scrofa
tggctgctgtgtccttgctt

SEQ ID NO: 4025 - DNA, 20 bp, Sus scrofa
ggctgctgtgtccttgcttt

SEQ ID NO: 4026 - DNA, 20 bp, Sus scrofa
caaaacgtgtccccaaagca

SEQ ID NO: 4027 - DNA, 20 bp, Sus scrofa
gctgctgtgtccttgctttg

SEQ ID NO: 4028 - DNA, 20 bp, Sus scrofa
gctttggggacacgttttgc

SEQ ID NO: 4029 - DNA, 20 bp, Sus scrofa
ttgcaggaaatgccagagcc

SEQ ID NO: 4030 - DNA, 20 bp, Sus scrofa
gagatcagactgcctggctc

SEQ ID NO: 4031 - DNA, 20 bp, Sus scrofa
ccccaagagatcagactgcc

SEQ ID NO: 4032 - DNA, 20 bp, Sus scrofa
agccaggcagtctgatctct

SEQ ID NO: 4033 - DNA, 20 bp, Sus scrofa
gccaggcagtctgatctctt

SEQ ID NO: 4034 - DNA, 20 bp, Sus scrofa
ccaggcagtctgatctcttg

SEQ ID NO: 4035 - DNA, 20 bp, Sus scrofa
caggcagtctgatctcttgg

SEQ ID NO: 4036 - DNA, 20 bp, Sus scrofa
ggggctgagtacgaagatgc

SEQ ID NO: 4037 - DNA, 20 bp, Sus scrofa
cgaagatgcaggcacctctc

SEQ ID NO: 4038 - DNA, 20 bp, Sus scrofa
ctcaagtgtggacacctgag

SEQ ID NO: 4039 - DNA, 20 bp, Sus scrofa
tatgcttcatttctcaagtg

SEQ ID NO: 4040 - DNA, 20 bp, Sus scrofa
acacttgagaaatgaagcat

SEQ ID NO: 4041 - DNA, 20 bp, Sus scrofa
cacttgagaaatgaagcata

SEQ ID NO: 4042 - DNA, 20 bp, Sus scrofa
tgaagcatagggtcctgtgt

SEQ ID NO: 4043 - DNA, 20 bp, Sus scrofa
cctcaacaacaaacctacac

SEQ ID NO: 4044 - DNA, 20 bp, Sus scrofa
cctgtgtaggtttgttgttg

SEQ ID NO: 4045 - DNA, 20 bp, Sus scrofa
gtttgaaaagctcccgacag

SEQ ID NO: 4046 - DNA, 20 bp, Sus scrofa
ggagttcttctgcctctgtc

SEQ ID NO: 4047 - DNA, 20 bp, Sus scrofa
tggagttcttctgcctctgt

SEQ ID NO: 4048 - DNA, 20 bp, Sus scrofa
ggcagaagaactccagttgt

SEQ ID NO: 4049 - DNA, 20 bp, Sus scrofa
tctctctctagtccgacaac

SEQ ID NO: 4050 - DNA, 20 bp, Sus scrofa
agagagagagtaaccgcgtt

SEQ ID NO: 4051 - DNA, 20 bp, Sus scrofa
cgtttaaaaatatccaaacg

SEQ ID NO: 4052 - DNA, 20 bp, Sus scrofa
cgcgtttggatatttttaaa

SEQ ID NO: 4053 - DNA, 20 bp, Sus scrofa
ggatatttttaaacggccag

SEQ ID NO: 4054 - DNA, 20 bp, Sus scrofa
agactctctcccaattccac

SEQ ID NO: 4055 - DNA, 20 bp, Sus scrofa
ttttaaacggccagtggaat

SEQ ID NO: 4056 - DNA, 20 bp, Sus scrofa
tttaaacggccagtggaatt

SEQ ID NO: 4057 - DNA, 20 bp, Sus scrofa
aaactgaaaatttgtacttt

SEQ ID NO: 4058 - DNA, 20 bp, Sus scrofa
taaactgaaaatttgtactt

SEQ ID NO: 4059 - DNA, 20 bp, Sus scrofa
tttgcacttagctcacaccc

SEQ ID NO: 4060 - DNA, 20 bp, Sus scrofa
ttgcacttagctcacaccca

SEQ ID NO: 4061 - DNA, 20 bp, Sus scrofa
cttagctcacacccagggtt

SEQ ID NO: 4062 - DNA, 20 bp, Sus scrofa
attccccgctgccaaaccct

SEQ ID NO: 4063 - DNA, 20 bp, Sus scrofa
cattccccgctgccaaaccc

SEQ ID NO: 4064 - DNA, 20 bp, Sus scrofa
tcacacccagggtttggcag

SEQ ID NO: 4065 - DNA, 20 bp, Sus scrofa
cacacccagggtttggcagc

SEQ ID NO: 4066 - DNA, 20 bp, Sus scrofa
acacccagggtttggcagcg

SEQ ID NO: 4067 - DNA, 20 bp, Sus scrofa
cagggtttggcagcggggaa

SEQ ID NO: 4068 - DNA, 20 bp, Sus scrofa
agggtttggcagcggggaat

SEQ ID NO: 4069 - DNA, 20 bp, Sus scrofa
aaaagaaaaaaagaaaagta

SEQ ID NO: 4070 - DNA, 20 bp, Sus scrofa
tttttaagcagaacacaccc

SEQ ID NO: 4071 - DNA, 20 bp, Sus scrofa
gaacatcccttttacatcca

SEQ ID NO: 4072 - DNA, 20 bp, Sus scrofa
agaacatcccttttacatcc

SEQ ID NO: 4073 - DNA, 20 bp, Sus scrofa
gaacacaccctggatgtaaa

SEQ ID NO: 4074 - DNA, 20 bp, Sus scrofa
aacacaccctggatgtaaaa

SEQ ID NO: 4075 - DNA, 20 bp, Sus scrofa
aaagggatgttctcttcaca

SEQ ID NO: 4076 - DNA, 20 bp, Sus scrofa
tctcttcacatggaagagtt

SEQ ID NO: 4077 - DNA, 20 bp, Sus scrofa
ctcttcacatggaagagttt

SEQ ID NO: 4078 - DNA, 20 bp, Sus scrofa
tcttcacatggaagagtttg

SEQ ID NO: 4079 - DNA, 20 bp, Sus scrofa
tcacatggaagagtttgggg

SEQ ID NO: 4080 - DNA, 20 bp, Sus scrofa
cacttcctcccctctctgct

SEQ ID NO: 4081 - DNA, 20 bp, Sus scrofa
ggcggcagcaccgagcagag

SEQ ID NO: 4082 - DNA, 20 bp, Sus scrofa
gcggcagcaccgagcagaga

SEQ ID NO: 4083 - DNA, 20 bp, Sus scrofa
cggcagcaccgagcagagag

SEQ ID NO: 4084 - DNA, 20 bp, Sus scrofa
cagcaccgagcagagagggg

SEQ ID NO: 4085 - DNA, 20 bp, Sus scrofa
cgagcagagaggggaggaag

SEQ ID NO: 4086 - DNA, 20 bp, Sus scrofa
gagcagagaggggaggaagt

SEQ ID NO: 4087 - DNA, 20 bp, Sus scrofa
agagaggggaggaagtgggt

SEQ ID NO: 4088 - DNA, 20 bp, Sus scrofa
aagtgggttggaattgcagc

SEQ ID NO: 4089 - DNA, 20 bp, Sus scrofa
aggatttcagagtcaattta

SEQ ID NO: 4090 - DNA, 20 bp, Sus scrofa
agagtcaatttaaggaagat

SEQ ID NO: 4091 - DNA, 20 bp, Sus scrofa
gagtcaatttaaggaagatt

SEQ ID NO: 4092 - DNA, 20 bp, Sus scrofa
agtcaatttaaggaagattg

SEQ ID NO: 4093 - DNA, 20 bp, Sus scrofa
caatttaaggaagattgggg

SEQ ID NO: 4094 - DNA, 20 bp, Sus scrofa
ttaaggaagattggggtggt

SEQ ID NO: 4095 - DNA, 20 bp, Sus scrofa
tgttttgaaacacatgagcc

SEQ ID NO: 4096 - DNA, 20 bp, Sus scrofa
tgaaacacatgagcctggct

SEQ ID NO: 4097 - DNA, 20 bp, Sus scrofa
gaaacacatgagcctggctt

SEQ ID NO: 4098 - DNA, 20 bp, Sus scrofa
tctcttacagctcccaagcc

SEQ ID NO: 4099 - DNA, 20 bp, Sus scrofa
ttgggagctgtaagagagca

SEQ ID NO: 4100 - DNA, 20 bp, Sus scrofa
taagagagcatggccctgtg

SEQ ID NO: 4101 - DNA, 20 bp, Sus scrofa
gctccacctgcctccacaca

SEQ ID NO: 4102 - DNA, 20 bp, Sus scrofa
gagagcatggccctgtgtgg

SEQ ID NO: 4103 - DNA, 20 bp, Sus scrofa
tgctccacctgcctccacac

SEQ ID NO: 4104 - DNA, 20 bp, Sus scrofa
gcatggccctgtgtggaggc

SEQ ID NO: 4105 - DNA, 20 bp, Sus scrofa
tggccctgtgtggaggcagg

SEQ ID NO: 4106 - DNA, 20 bp, Sus scrofa
tgtgtggaggcaggtggagc

SEQ ID NO: 4107 - DNA, 20 bp, Sus scrofa
gtgtggaggcaggtggagca

SEQ ID NO: 4108 - DNA, 20 bp, Sus scrofa
tgtggaggcaggtggagcag

SEQ ID NO: 4109 - DNA, 20 bp, Sus scrofa
gtggaggcaggtggagcagg

SEQ ID NO: 4110 - DNA, 20 bp, Sus scrofa
gaggcaggtggagcaggggg

SEQ ID NO: 4111 - DNA, 20 bp, Sus scrofa
ggtggacagcagacttccac

SEQ ID NO: 4112 - DNA, 20 bp, Sus scrofa
ccagtgcaacagctgacctg

SEQ ID NO: 4113 - DNA, 20 bp, Sus scrofa
ccacaggtcagctgttgcac

SEQ ID NO: 4114 - DNA, 20 bp, Sus scrofa
agcctgtgaagcgtctgtaa

SEQ ID NO: 4115 - DNA, 20 bp, Sus scrofa
atccattacagacgcttcac

SEQ ID NO: 4116 - DNA, 20 bp, Sus scrofa
tgtgtcacattggagatggc

SEQ ID NO: 4117 - DNA, 20 bp, Sus scrofa
gtgatgtgtcacattggaga

SEQ ID NO: 4118 - DNA, 20 bp, Sus scrofa
tttggggtgatgtgtcacat

SEQ ID NO: 4119 - DNA, 20 bp, Sus scrofa
aaacccactgctgctttttg

SEQ ID NO: 4120 - DNA, 20 bp, Sus scrofa
gaaacccactgctgcttttt

SEQ ID NO: 4121 - DNA, 20 bp, Sus scrofa
ggaaacccactgctgctttt

SEQ ID NO: 4122 - DNA, 20 bp, Sus scrofa
atcaccccaaaaagcagcag

SEQ ID NO: 4123 - DNA, 20 bp, Sus scrofa
tcaccccaaaaagcagcagt

SEQ ID NO: 4124 - DNA, 20 bp, Sus scrofa
gcagtgggtttcctccgatg

SEQ ID NO: 4125 - DNA, 20 bp, Sus scrofa
gaaagcccacaccacatcgg

SEQ ID NO: 4126 - DNA, 20 bp, Sus scrofa
ccagaaagcccacaccacat

SEQ ID NO: 4127 - DNA, 20 bp, Sus scrofa
gggtttcctccgatgtggtg

SEQ ID NO: 4128 - DNA, 20 bp, Sus scrofa
ggtttcctccgatgtggtgt

SEQ ID NO: 4129 - DNA, 20 bp, Sus scrofa
ccgatgtggtgtgggctttc

SEQ ID NO: 4130 - DNA, 20 bp, Sus scrofa
tctggtgatatcagcatcgt

SEQ ID NO: 4131 - DNA, 20 bp, Sus scrofa
ctggtgatatcagcatcgtt

SEQ ID NO: 4132 - DNA, 20 bp, Sus scrofa
tggtgatatcagcatcgttg

SEQ ID NO: 4133 - DNA, 20 bp, Sus scrofa
aggaggggagagatgggctg

SEQ ID NO: 4134 - DNA, 20 bp, Sus scrofa
agatcaaggaggggagagat

SEQ ID NO: 4135 - DNA, 20 bp, Sus scrofa
gagatcaaggaggggagaga

SEQ ID NO: 4136 - DNA, 20 bp, Sus scrofa
tttgggaagagatcaaggag

SEQ ID NO: 4137 - DNA, 20 bp, Sus scrofa
gtttgggaagagatcaagga

SEQ ID NO: 4138 - DNA, 20 bp, Sus scrofa
agtttgggaagagatcaagg

SEQ ID NO: 4139 - DNA, 20 bp, Sus scrofa
cgcagtttgggaagagatca

SEQ ID NO: 4140 - DNA, 20 bp, Sus scrofa
gcagggttttggcgcagttt

SEQ ID NO: 4141 - DNA, 20 bp, Sus scrofa
ggcagggttttggcgcagtt

SEQ ID NO: 4142 - DNA, 20 bp, Sus scrofa
cttccttcctggcagggttt

SEQ ID NO: 4143 - DNA, 20 bp, Sus scrofa
aactgcgccaaaaccctgcc

SEQ ID NO: 4144 - DNA, 20 bp, Sus scrofa
tctgcacttccttcctggca

SEQ ID NO: 4145 - DNA, 20 bp, Sus scrofa
ttctgcacttccttcctggc

SEQ ID NO: 4146 - DNA, 20 bp, Sus scrofa
gcgccaaaaccctgccagga

SEQ ID NO: 4147 - DNA, 20 bp, Sus scrofa
cgctttctgcacttccttcc

SEQ ID NO: 4148 - DNA, 20 bp, Sus scrofa
ggaaggaagtgcagaaagcg

SEQ ID NO: 4149 - DNA, 20 bp, Sus scrofa
tgcagaaagcgtggtcatcc

SEQ ID NO: 4150 - DNA, 20 bp, Sus scrofa
agaaagcgtggtcatcctgg

SEQ ID NO: 4151 - DNA, 20 bp, Sus scrofa
cccaggtctgtggggcctcc

SEQ ID NO: 4152 - DNA, 20 bp, Sus scrofa
gtggctctcccaggtctgtg

SEQ ID NO: 4153 - DNA, 20 bp, Sus scrofa
ggtggctctcccaggtctgt

SEQ ID NO: 4154 - DNA, 20 bp, Sus scrofa
tcctggaggccccacagacc

SEQ ID NO: 4155 - DNA, 20 bp, Sus scrofa
gggtggctctcccaggtctg

SEQ ID NO: 4156 - DNA, 20 bp, Sus scrofa
cctggaggccccacagacct

SEQ ID NO: 4157 - DNA, 20 bp, Sus scrofa
aaaagccgggtggctctccc

SEQ ID NO: 4158 - DNA, 20 bp, Sus scrofa
acagacctgggagagccacc

SEQ ID NO: 4159 - DNA, 20 bp, Sus scrofa
ttggtgtctgaaaagccggg

SEQ ID NO: 4160 - DNA, 20 bp, Sus scrofa
cctttggtgtctgaaaagcc

SEQ ID NO: 4161 - DNA, 20 bp, Sus scrofa
gcctttggtgtctgaaaagc

SEQ ID NO: 4162 - DNA, 20 bp, Sus scrofa
cccggcttttcagacaccaa

SEQ ID NO: 4163 - DNA, 20 bp, Sus scrofa
cacttgggagggaaagcctt

SEQ ID NO: 4164 - DNA, 20 bp, Sus scrofa
ccacctctcatcacttggga

SEQ ID NO: 4165 - DNA, 20 bp, Sus scrofa
gccacctctcatcacttggg

SEQ ID NO: 4166 - DNA, 20 bp, Sus scrofa
gaggccacctctcatcactt

SEQ ID NO: 4167 - DNA, 20 bp, Sus scrofa
agaggccacctctcatcact

SEQ ID NO: 4168 - DNA, 20 bp, Sus scrofa
tttccctcccaagtgatgag

SEQ ID NO: 4169 - DNA, 20 bp, Sus scrofa
ccctcccaagtgatgagagg

SEQ ID NO: 4170 - DNA, 20 bp, Sus scrofa
gctcctccccaaggagcaag

SEQ ID NO: 4171 - DNA, 20 bp, Sus scrofa
agaggtggcctcttgctcct

SEQ ID NO: 4172 - DNA, 20 bp, Sus scrofa
gaggtggcctcttgctcctt

SEQ ID NO: 4173 - DNA, 20 bp, Sus scrofa
aggtggcctcttgctccttg

SEQ ID NO: 4174 - DNA, 20 bp, Sus scrofa
tggcctcttgctccttgggg

SEQ ID NO: 4175 - DNA, 20 bp, Sus scrofa
accctgcctgctcctcccca

SEQ ID NO: 4176 - DNA, 20 bp, Sus scrofa
cttgctccttggggaggagc

SEQ ID NO: 4177 - DNA, 20 bp, Sus scrofa
ctccttggggaggagcaggc

SEQ ID NO: 4178 - DNA, 20 bp, Sus scrofa
tccttggggaggagcaggca

SEQ ID NO: 4179 - DNA, 20 bp, Sus scrofa
ggaggagcaggcagggtctc

SEQ ID NO: 4180 - DNA, 20 bp, Sus scrofa
aggcagggtctcaggccccc

SEQ ID NO: 4181 - DNA, 20 bp, Sus scrofa
agttctggagaggggccagg

SEQ ID NO: 4182 - DNA, 20 bp, Sus scrofa
cagttctggagaggggccag

SEQ ID NO: 4183 - DNA, 20 bp, Sus scrofa
gcagttctggagaggggcca

SEQ ID NO: 4184 - DNA, 20 bp, Sus scrofa
ggcagttctggagaggggcc

SEQ ID NO: 4185 - DNA, 20 bp, Sus scrofa
gggagggcagttctggagag

SEQ ID NO: 4186 - DNA, 20 bp, Sus scrofa
agggagggcagttctggaga

SEQ ID NO: 4187 - DNA, 20 bp, Sus scrofa
gagggagggcagttctggag

SEQ ID NO: 4188 - DNA, 20 bp, Sus scrofa
gctgagagggagggcagttc

SEQ ID NO: 4189 - DNA, 20 bp, Sus scrofa
gatgacgctgctgagaggga

SEQ ID NO: 4190 - DNA, 20 bp, Sus scrofa
tgatgacgctgctgagaggg

SEQ ID NO: 4191 - DNA, 20 bp, Sus scrofa
ctctgatgacgctgctgaga

SEQ ID NO: 4192 - DNA, 20 bp, Sus scrofa
gctctgatgacgctgctgag

SEQ ID NO: 4193 - DNA, 20 bp, Sus scrofa
tcagcagcgtcatcagagct

SEQ ID NO: 4194 - DNA, 20 bp, Sus scrofa
cagcagcgtcatcagagctt

SEQ ID NO: 4195 - DNA, 20 bp, Sus scrofa
catcagagcttgggctgagc

SEQ ID NO: 4196 - DNA, 20 bp, Sus scrofa
gctgagctggttttgtgctt

SEQ ID NO: 4197 - DNA, 20 bp, Sus scrofa
gttttgtgctttggttactg

SEQ ID NO: 4198 - DNA, 20 bp, Sus scrofa
gttactgaggaagtgtaacc

SEQ ID NO: 4199 - DNA, 20 bp, Sus scrofa
ttactgaggaagtgtaacca

SEQ ID NO: 4200 - DNA, 20 bp, Sus scrofa
ctgaggaagtgtaaccaggg

SEQ ID NO: 4201 - DNA, 20 bp, Sus scrofa
tgaggaagtgtaaccagggt

SEQ ID NO: 4202 - DNA, 20 bp, Sus scrofa
gaggaagtgtaaccagggtg

SEQ ID NO: 4203 - DNA, 20 bp, Sus scrofa
actcccagccatccccaccc

SEQ ID NO: 4204 - DNA, 20 bp, Sus scrofa
aagtgtaaccagggtgggga

SEQ ID NO: 4205 - DNA, 20 bp, Sus scrofa
gtaaccagggtggggatggc

SEQ ID NO: 4206 - DNA, 20 bp, Sus scrofa
taaccagggtggggatggct

SEQ ID NO: 4207 - DNA, 20 bp, Sus scrofa
agggtggggatggctgggag

SEQ ID NO: 4208 - DNA, 20 bp, Sus scrofa
ggctgggagtggcccccact

SEQ ID NO: 4209 - DNA, 20 bp, Sus scrofa
ctgttccactagccaagtgg

SEQ ID NO: 4210 - DNA, 20 bp, Sus scrofa
actgttccactagccaagtg

SEQ ID NO: 4211 - DNA, 20 bp, Sus scrofa
aactgttccactagccaagt

SEQ ID NO: 4212 - DNA, 20 bp, Sus scrofa
taactgttccactagccaag

SEQ ID NO: 4213 - DNA, 20 bp, Sus scrofa
agtggcccccacttggctag

SEQ ID NO: 4214 - DNA, 20 bp, Sus scrofa
gctagtggaacagttagaag

SEQ ID NO: 4215 - DNA, 20 bp, Sus scrofa
ctagtggaacagttagaaga

SEQ ID NO: 4216 - DNA, 20 bp, Sus scrofa
tagtggaacagttagaagag

SEQ ID NO: 4217 - DNA, 20 bp, Sus scrofa
acagttagaagaggggctga

SEQ ID NO: 4218 - DNA, 20 bp, Sus scrofa
agaggggctgaaggatgtgt

SEQ ID NO: 4219 - DNA, 20 bp, Sus scrofa
aaggatgtgtaggtacagtc

SEQ ID NO: 4220 - DNA, 20 bp, Sus scrofa
aggatgtgtaggtacagtca

SEQ ID NO: 4221 - DNA, 20 bp, Sus scrofa
gtacagtcagggcagcttgt

SEQ ID NO: 4222 - DNA, 20 bp, Sus scrofa
ggcagcttgttggattgaat

SEQ ID NO: 4223 - DNA, 20 bp, Sus scrofa
gcagcttgttggattgaatt

SEQ ID NO: 4224 - DNA, 20 bp, Sus scrofa
cagcttgttggattgaattg

SEQ ID NO: 4225 - DNA, 20 bp, Sus scrofa
agcttgttggattgaattgg

SEQ ID NO: 4226 - DNA, 20 bp, Sus scrofa
gcttgttggattgaattggg

SEQ ID NO: 4227 - DNA, 20 bp, Sus scrofa
cttgttggattgaattgggg

SEQ ID NO: 4228 - DNA, 20 bp, Sus scrofa
tggattgaattgggggggtc

SEQ ID NO: 4229 - DNA, 20 bp, Sus scrofa
gggggggtctggaaacaatg

SEQ ID NO: 4230 - DNA, 20 bp, Sus scrofa
aagtgttgcaggataaggag

SEQ ID NO: 4231 - DNA, 20 bp, Sus scrofa
taagtgttgcaggataagga

SEQ ID NO: 4232 - DNA, 20 bp, Sus scrofa
gtaagtgttgcaggataagg

SEQ ID NO: 4233 - DNA, 20 bp, Sus scrofa
gcagtaagtgttgcaggata

SEQ ID NO: 4234 - DNA, 20 bp, Sus scrofa
ccggcggcagtaagtgttgc

SEQ ID NO: 4235 - DNA, 20 bp, Sus scrofa
cctgcaacacttactgccgc

SEQ ID NO: 4236 - DNA, 20 bp, Sus scrofa
ctgcaacacttactgccgcc

SEQ ID NO: 4237 - DNA, 20 bp, Sus scrofa
gggtgtgttcagactcccgg

SEQ ID NO: 4238 - DNA, 20 bp, Sus scrofa
ggagggtgtgttcagactcc

SEQ ID NO: 4239 - DNA, 20 bp, Sus scrofa
tcccaggaatgggcatagga

SEQ ID NO: 4240 - DNA, 20 bp, Sus scrofa
gtcccaggaatgggcatagg

SEQ ID NO: 4241 - DNA, 20 bp, Sus scrofa
aaagtcccaggaatgggcat

SEQ ID NO: 4242 - DNA, 20 bp, Sus scrofa
caccctcctatgcccattcc

SEQ ID NO: 4243 - DNA, 20 bp, Sus scrofa
accctcctatgcccattcct

SEQ ID NO: 4244 - DNA, 20 bp, Sus scrofa
gttcctaaagtcccaggaat

SEQ ID NO: 4245 - DNA, 20 bp, Sus scrofa
tgttcctaaagtcccaggaa

SEQ ID NO: 4246 - DNA, 20 bp, Sus scrofa
ctcagtgttcctaaagtccc

SEQ ID NO: 4247 - DNA, 20 bp, Sus scrofa
atgcccattcctgggacttt

SEQ ID NO: 4248 - DNA, 20 bp, Sus scrofa
taggaacactgagcccaatg

SEQ ID NO: 4249 - DNA, 20 bp, Sus scrofa
tcccattttatagccacatt

SEQ ID NO: 4250 - DNA, 20 bp, Sus scrofa
ctcccattttatagccacat

SEQ ID NO: 4251 - DNA, 20 bp, Sus scrofa
agcccaatgtggctataaaa

SEQ ID NO: 4252 - DNA, 20 bp, Sus scrofa
gcccaatgtggctataaaat

SEQ ID NO: 4253 - DNA, 20 bp, Sus scrofa
ctgctccatggggtattatg

SEQ ID NO: 4254 - DNA, 20 bp, Sus scrofa
actgctccatggggtattat

SEQ ID NO: 4255 - DNA, 20 bp, Sus scrofa
gactgctccatggggtatta

SEQ ID NO: 4256 - DNA, 20 bp, Sus scrofa
gaacaccccataatacccca

SEQ ID NO: 4257 - DNA, 20 bp, Sus scrofa
atcctcacgactgctccatg

SEQ ID NO: 4258 - DNA, 20 bp, Sus scrofa
aatcctcacgactgctccat

SEQ ID NO: 4259 - DNA, 20 bp, Sus scrofa
caatcctcacgactgctcca

SEQ ID NO: 4260 - DNA, 20 bp, Sus scrofa
taccccatggagcagtcgtg

SEQ ID NO: 4261 - DNA, 20 bp, Sus scrofa
catggagcagtcgtgaggat

SEQ ID NO: 4262 - DNA, 20 bp, Sus scrofa
atgagatagtgcctgtgaag

SEQ ID NO: 4263 - DNA, 20 bp, Sus scrofa
tcagcaggcaccctcttcac

SEQ ID NO: 4264 - DNA, 20 bp, Sus scrofa
tgagatagtgcctgtgaaga

SEQ ID NO: 4265 - DNA, 20 bp, Sus scrofa
tgtgaagagggtgcctgctg

SEQ ID NO: 4266 - DNA, 20 bp, Sus scrofa
gtgaagagggtgcctgctga

SEQ ID NO: 4267 - DNA, 20 bp, Sus scrofa
atctttcctgggccctcagc

SEQ ID NO: 4268 - DNA, 20 bp, Sus scrofa
agggtgcctgctgagggccc

SEQ ID NO: 4269 - DNA, 20 bp, Sus scrofa
gctaccacaggatctttcct

SEQ ID NO: 4270 - DNA, 20 bp, Sus scrofa
agctaccacaggatctttcc

SEQ ID NO: 4271 - DNA, 20 bp, Sus scrofa
agggcccaggaaagatcctg

SEQ ID NO: 4272 - DNA, 20 bp, Sus scrofa
tttatagtaacagctaccac

SEQ ID NO: 4273 - DNA, 20 bp, Sus scrofa
gctgttactataaacagtaa

SEQ ID NO: 4274 - DNA, 20 bp, Sus scrofa
gttactataaacagtaatgg

SEQ ID NO: 4275 - DNA, 20 bp, Sus scrofa
tggcttgcatgttgtccccg

SEQ ID NO: 4276 - DNA, 20 bp, Sus scrofa
ggcttgcatgttgtccccga

SEQ ID NO: 4277 - DNA, 20 bp, Sus scrofa
gcttgcatgttgtccccgag

SEQ ID NO: 4278 - DNA, 20 bp, Sus scrofa
agtggtggccactcccctcg

SEQ ID NO: 4279 - DNA, 20 bp, Sus scrofa
aagtggtggccactcccctc

SEQ ID NO: 4280 - DNA, 20 bp, Sus scrofa
aaagtggtggccactcccct

SEQ ID NO: 4281 - DNA, 20 bp, Sus scrofa
catgttgtccccgaggggag

SEQ ID NO: 4282 - DNA, 20 bp, Sus scrofa
gaggggagtggccaccactt

SEQ ID NO: 4283 - DNA, 20 bp, Sus scrofa
cagcaccaagcccaaagtgg

SEQ ID NO: 4284 - DNA, 20 bp, Sus scrofa
aggggagtggccaccacttt

SEQ ID NO: 4285 - DNA, 20 bp, Sus scrofa
tcccagcaccaagcccaaag

SEQ ID NO: 4286 - DNA, 20 bp, Sus scrofa
agtggccaccactttgggct

SEQ ID NO: 4287 - DNA, 20 bp, Sus scrofa
caccactttgggcttggtgc

SEQ ID NO: 4288 - DNA, 20 bp, Sus scrofa
accactttgggcttggtgct

SEQ ID NO: 4289 - DNA, 20 bp, Sus scrofa
ttgggcttggtgctgggagc

SEQ ID NO: 4290 - DNA, 20 bp, Sus scrofa
tgggcttggtgctgggagct

SEQ ID NO: 4291 - DNA, 20 bp, Sus scrofa
ttggtgctgggagctgggac

SEQ ID NO: 4292 - DNA, 20 bp, Sus scrofa
agaatcctatagacagacac

SEQ ID NO: 4293 - DNA, 20 bp, Sus scrofa
tggaacctgtgtctgtctat

SEQ ID NO: 4294 - DNA, 20 bp, Sus scrofa
tgtctgtctataggattctc

SEQ ID NO: 4295 - DNA, 20 bp, Sus scrofa
aggcagcagcatgcctcttc

SEQ ID NO: 4296 - DNA, 20 bp, Sus scrofa
tgtcggcctctttcctgaag

SEQ ID NO: 4297 - DNA, 20 bp, Sus scrofa
agcatgcctcttcaggaaag

SEQ ID NO: 4298 - DNA, 20 bp, Sus scrofa
tcaggaaagaggccgacatc

SEQ ID NO: 4299 - DNA, 20 bp, Sus scrofa
caggaaagaggccgacatcc

SEQ ID NO: 4300 - DNA, 20 bp, Sus scrofa
agggaattcctcccggatgt

SEQ ID NO: 4301 - DNA, 20 bp, Sus scrofa
gaaagaggccgacatccggg

SEQ ID NO: 4302 - DNA, 20 bp, Sus scrofa
ggagtcaagggaattcctcc

SEQ ID NO: 4303 - DNA, 20 bp, Sus scrofa
aggtggtgctgcggagtcaa

SEQ ID NO: 4304 - DNA, 20 bp, Sus scrofa
aaggtggtgctgcggagtca

SEQ ID NO: 4305 - DNA, 20 bp, Sus scrofa
aacaaggaaaggtggtgctg

SEQ ID NO: 4306 - DNA, 20 bp, Sus scrofa
gcctcaggaacaaggaaagg

SEQ ID NO: 4307 - DNA, 20 bp, Sus scrofa
aaggcctcaggaacaaggaa

SEQ ID NO: 4308 - DNA, 20 bp, Sus scrofa
aggagaaggcctcaggaaca

SEQ ID NO: 4309 - DNA, 20 bp, Sus scrofa
accacctttccttgttcctg

SEQ ID NO: 4310 - DNA, 20 bp, Sus scrofa
tcagccaaggagaaggcctc

SEQ ID NO: 4311 - DNA, 20 bp, Sus scrofa
tgttcctgaggccttctcct

SEQ ID NO: 4312 - DNA, 20 bp, Sus scrofa
atggccatcagccaaggaga

SEQ ID NO: 4313 - DNA, 20 bp, Sus scrofa
ttctctatggccatcagcca

SEQ ID NO: 4314 - DNA, 20 bp, Sus scrofa
gaggccttctccttggctga

SEQ ID NO: 4315 - DNA, 20 bp, Sus scrofa
acgggtcaagagcttctcta

SEQ ID NO: 4316 - DNA, 20 bp, Sus scrofa
agagaagctcttgacccgtc

SEQ ID NO: 4317 - DNA, 20 bp, Sus scrofa
gacatgtggtttttccagac

SEQ ID NO: 4318 - DNA, 20 bp, Sus scrofa
agacatgtggtttttccaga

SEQ ID NO: 4319 - DNA, 20 bp, Sus scrofa
cctcaaagatttcagacatg

SEQ ID NO: 4320 - DNA, 20 bp, Sus scrofa
ccacatgtctgaaatctttg

SEQ ID NO: 4321 - DNA, 20 bp, Sus scrofa
cacatgtctgaaatctttga

SEQ ID NO: 4322 - DNA, 20 bp, Sus scrofa
atgtctgaaatctttgaggg

SEQ ID NO: 4323 - DNA, 20 bp, Sus scrofa
tgaaatctttgagggtggac

SEQ ID NO: 4324 - DNA, 20 bp, Sus scrofa
ataaaagaaaaatatgagaa

SEQ ID NO: 4325 - DNA, 20 bp, Sus scrofa
cataaaagaaaaatatgaga

SEQ ID NO: 4326 - DNA, 20 bp, Sus scrofa
atgaagcttaaagaattccc

SEQ ID NO: 4327 - DNA, 20 bp, Sus scrofa
tgaagcttaaagaattccca

SEQ ID NO: 4328 - DNA, 20 bp, Sus scrofa
tcctttccttggaaggccct

SEQ ID NO: 4329 - DNA, 20 bp, Sus scrofa
ctcctttccttggaaggccc

SEQ ID NO: 4330 - DNA, 20 bp, Sus scrofa
agaattcccagggccttcca

SEQ ID NO: 4331 - DNA, 20 bp, Sus scrofa
cagtcactcctttccttgga

SEQ ID NO: 4332 - DNA, 20 bp, Sus scrofa
tcccagggccttccaaggaa

SEQ ID NO: 4333 - DNA, 20 bp, Sus scrofa
tcttcagtcactcctttcct

SEQ ID NO: 4334 - DNA, 20 bp, Sus scrofa
aggagtgactgaagacgcct

SEQ ID NO: 4335 - DNA, 20 bp, Sus scrofa
ggagtgactgaagacgccta

SEQ ID NO: 4336 - DNA, 20 bp, Sus scrofa
ctgctggagtcacgcgccct

SEQ ID NO: 4337 - DNA, 20 bp, Sus scrofa
cctctgtgcgcagtcactgc

SEQ ID NO: 4338 - DNA, 20 bp, Sus scrofa
ccagcagtgactgcgcacag

SEQ ID NO: 4339 - DNA, 20 bp, Sus scrofa
cagcagtgactgcgcacaga

SEQ ID NO: 4340 - DNA, 20 bp, Sus scrofa
agcagtgactgcgcacagag

SEQ ID NO: 4341 - DNA, 20 bp, Sus scrofa
gcagtgactgcgcacagagg

SEQ ID NO: 4342 - DNA, 20 bp, Sus scrofa
gtgactgcgcacagaggggg

SEQ ID NO: 4343 - DNA, 20 bp, Sus scrofa
gatcaactgtactaaggagg

SEQ ID NO: 4344 - DNA, 20 bp, Sus scrofa
agatcaactgtactaaggag

SEQ ID NO: 4345 - DNA, 20 bp, Sus scrofa
gagatcaactgtactaagga

SEQ ID NO: 4346 - DNA, 20 bp, Sus scrofa
agagatcaactgtactaagg

SEQ ID NO: 4347 - DNA, 20 bp, Sus scrofa
gagagagatcaactgtacta

SEQ ID NO: 4348 - DNA, 20 bp, Sus scrofa
ccttaggggagcagagcaag

SEQ ID NO: 4349 - DNA, 20 bp, Sus scrofa
ccacttgctctgctccccta

SEQ ID NO: 4350 - DNA, 20 bp, Sus scrofa
gccaggaagccaggccttag

SEQ ID NO: 4351 - DNA, 20 bp, Sus scrofa
agccaggaagccaggcctta

SEQ ID NO: 4352 - DNA, 20 bp, Sus scrofa
tgctctgctcccctaaggcc

SEQ ID NO: 4353 - DNA, 20 bp, Sus scrofa
gagccaggaagccaggcctt

SEQ ID NO: 4354 - DNA, 20 bp, Sus scrofa
cagtgtagagccaggaagcc

SEQ ID NO: 4355 - DNA, 20 bp, Sus scrofa
tcccctaaggcctggcttcc

SEQ ID NO: 4356 - DNA, 20 bp, Sus scrofa
caggaaatcagtgtagagcc

SEQ ID NO: 4357 - DNA, 20 bp, Sus scrofa
ctacactgatttcctgccct

SEQ ID NO: 4358 - DNA, 20 bp, Sus scrofa
tacactgatttcctgcccta

SEQ ID NO: 4359 - DNA, 20 bp, Sus scrofa
tgaggcctttgccctagggc

SEQ ID NO: 4360 - DNA, 20 bp, Sus scrofa
cctgtgaggcctttgcccta

SEQ ID NO: 4361 - DNA, 20 bp, Sus scrofa
tcctgtgaggcctttgccct

SEQ ID NO: 4362 - DNA, 20 bp, Sus scrofa
gatttcctgccctagggcaa

SEQ ID NO: 4363 - DNA, 20 bp, Sus scrofa
ccctagggcaaaggcctcac

SEQ ID NO: 4364 - DNA, 20 bp, Sus scrofa
gcctgggaataaatcctgtg

SEQ ID NO: 4365 - DNA, 20 bp, Sus scrofa
gcctcacaggatttattccc

SEQ ID NO: 4366 - DNA, 20 bp, Sus scrofa
ggtcactggcaagagtgcct

SEQ ID NO: 4367 - DNA, 20 bp, Sus scrofa
aggtcactggcaagagtgcc

SEQ ID NO: 4368 - DNA, 20 bp, Sus scrofa
ggccaccttctcaaggtcac

SEQ ID NO: 4369 - DNA, 20 bp, Sus scrofa
tcttgccagtgaccttgaga

SEQ ID NO: 4370 - DNA, 20 bp, Sus scrofa
caggtcaggccaccttctca

SEQ ID NO: 4371 - DNA, 20 bp, Sus scrofa
tgccagtgaccttgagaagg

SEQ ID NO: 4372 - DNA, 20 bp, Sus scrofa
cttgagaaggtggcctgacc

SEQ ID NO: 4373 - DNA, 20 bp, Sus scrofa
agaggccagatgtccaggtc

SEQ ID NO: 4374 - DNA, 20 bp, Sus scrofa
ccaggagaggccagatgtcc

SEQ ID NO: 4375 - DNA, 20 bp, Sus scrofa
ggtggcctgacctggacatc

SEQ ID NO: 4376 - DNA, 20 bp, Sus scrofa
cctggacatctggcctctcc

SEQ ID NO: 4377 - DNA, 20 bp, Sus scrofa
ctggacatctggcctctcct

SEQ ID NO: 4378 - DNA, 20 bp, Sus scrofa
tggacatctggcctctcctg

SEQ ID NO: 4379 - DNA, 20 bp, Sus scrofa
accctctcagtccccaggag

SEQ ID NO: 4380 - DNA, 20 bp, Sus scrofa
ttcccaccctctcagtcccc

SEQ ID NO: 4381 - DNA, 20 bp, Sus scrofa
ggcctctcctggggactgag

SEQ ID NO: 4382 - DNA, 20 bp, Sus scrofa
gcctctcctggggactgaga

SEQ ID NO: 4383 - DNA, 20 bp, Sus scrofa
tctcctggggactgagaggg

SEQ ID NO: 4384 - DNA, 20 bp, Sus scrofa
ctcctggggactgagagggt

SEQ ID NO: 4385 - DNA, 20 bp, Sus scrofa
ggggactgagagggtgggaa

SEQ ID NO: 4386 - DNA, 20 bp, Sus scrofa
ttccccttggatctggaatg

SEQ ID NO: 4387 - DNA, 20 bp, Sus scrofa
cttccccttggatctggaat

SEQ ID NO: 4388 - DNA, 20 bp, Sus scrofa
ccttccccttggatctggaa

SEQ ID NO: 4389 - DNA, 20 bp, Sus scrofa
actaccccattccagatcca

SEQ ID NO: 4390 - DNA, 20 bp, Sus scrofa
ggccaccttccccttggatc

SEQ ID NO: 4391 - DNA, 20 bp, Sus scrofa
ctaccccattccagatccaa

SEQ ID NO: 4392 - DNA, 20 bp, Sus scrofa
taccccattccagatccaag

SEQ ID NO: 4393 - DNA, 20 bp, Sus scrofa
ccattccagatccaagggga

SEQ ID NO: 4394 - DNA, 20 bp, Sus scrofa
tgccagggccaccttcccct

SEQ ID NO: 4395 - DNA, 20 bp, Sus scrofa
ttccagatccaaggggaagg

SEQ ID NO: 4396 - DNA, 20 bp, Sus scrofa
atccaaggggaaggtggccc

SEQ ID NO: 4397 - DNA, 20 bp, Sus scrofa
tggcctaggcactggtgcca

SEQ ID NO: 4398 - DNA, 20 bp, Sus scrofa
ttggcctaggcactggtgcc

SEQ ID NO: 4399 - DNA, 20 bp, Sus scrofa
tggccctggcaccagtgcct

SEQ ID NO: 4400 - DNA, 20 bp, Sus scrofa
caagctcttggcctaggcac

SEQ ID NO: 4401 - DNA, 20 bp, Sus scrofa
agctagcaagctcttggcct

SEQ ID NO: 4402 - DNA, 20 bp, Sus scrofa
ccaggaagctagcaagctct

SEQ ID NO: 4403 - DNA, 20 bp, Sus scrofa
ccaagagcttgctagcttcc

SEQ ID NO: 4404 - DNA, 20 bp, Sus scrofa
tgggacagcagcaatctgcc

SEQ ID NO: 4405 - DNA, 20 bp, Sus scrofa
tggcagattgctgctgtccc

SEQ ID NO: 4406 - DNA, 20 bp, Sus scrofa
aggggtaacccgctcagcct

SEQ ID NO: 4407 - DNA, 20 bp, Sus scrofa
gaggggtaacccgctcagcc

SEQ ID NO: 4408 - DNA, 20 bp, Sus scrofa
tgctgctgtcccaggctgag

SEQ ID NO: 4409 - DNA, 20 bp, Sus scrofa
gctgctgtcccaggctgagc

SEQ ID NO: 4410 - DNA, 20 bp, Sus scrofa
tgctttcttccctggtggag

SEQ ID NO: 4411 - DNA, 20 bp, Sus scrofa
gagcgggttacccctccacc

SEQ ID NO: 4412 - DNA, 20 bp, Sus scrofa
ctgctttcttccctggtgga

SEQ ID NO: 4413 - DNA, 20 bp, Sus scrofa
agcgggttacccctccacca

SEQ ID NO: 4414 - DNA, 20 bp, Sus scrofa
cctgctttcttccctggtgg

SEQ ID NO: 4415 - DNA, 20 bp, Sus scrofa
tgccctgctttcttccctgg

SEQ ID NO: 4416 - DNA, 20 bp, Sus scrofa
agctgccctgctttcttccc

SEQ ID NO: 4417 - DNA, 20 bp, Sus scrofa
cctccaccagggaagaaagc

SEQ ID NO: 4418 - DNA, 20 bp, Sus scrofa
ctccaccagggaagaaagca

SEQ ID NO: 4419 - DNA, 20 bp, Sus scrofa
ggaagaaagcagggcagctg

SEQ ID NO: 4420 - DNA, 20 bp, Sus scrofa
gaagaaagcagggcagctgt

SEQ ID NO: 4421 - DNA, 20 bp, Sus scrofa
aagaaagcagggcagctgtg

SEQ ID NO: 4422 - DNA, 20 bp, Sus scrofa
agggcagctgtggggccctg

SEQ ID NO: 4423 - DNA, 20 bp, Sus scrofa
tcagggcgcatctggccaca

SEQ ID NO: 4424 - DNA, 20 bp, Sus scrofa
atcagggcgcatctggccac

SEQ ID NO: 4425 - DNA, 20 bp, Sus scrofa
agggaacatcagggcgcatc

SEQ ID NO: 4426 - DNA, 20 bp, Sus scrofa
gaccagaccagggaacatca

SEQ ID NO: 4427 - DNA, 20 bp, Sus scrofa
tgaccagaccagggaacatc

SEQ ID NO: 4428 - DNA, 20 bp, Sus scrofa
agatgcgccctgatgttccc

SEQ ID NO: 4429 - DNA, 20 bp, Sus scrofa
cgccctgatgttccctggtc

SEQ ID NO: 4430 - DNA, 20 bp, Sus scrofa
ccttaccagtgaccagacca

SEQ ID NO: 4431 - DNA, 20 bp, Sus scrofa
cccttaccagtgaccagacc

SEQ ID NO: 4432 - DNA, 20 bp, Sus scrofa
atgttccctggtctggtcac

SEQ ID NO: 4433 - DNA, 20 bp, Sus scrofa
ccctggtctggtcactggta

SEQ ID NO: 4434 - DNA, 20 bp, Sus scrofa
cctggtctggtcactggtaa

SEQ ID NO: 4435 - DNA, 20 bp, Sus scrofa
tcactggtaagggtagactg

SEQ ID NO: 4436 - DNA, 20 bp, Sus scrofa
ctggtaagggtagactgagg

SEQ ID NO: 4437 - DNA, 20 bp, Sus scrofa
tggtaagggtagactgagga

SEQ ID NO: 4438 - DNA, 20 bp, Sus scrofa
agggtagactgaggagggca

SEQ ID NO: 4439 - DNA, 20 bp, Sus scrofa
tagactgaggagggcatggc

SEQ ID NO: 4440 - DNA, 20 bp, Sus scrofa
agggcatggcaggcctgctg

SEQ ID NO: 4441 - DNA, 20 bp, Sus scrofa
tggggaacagaatccacagc

SEQ ID NO: 4442 - DNA, 20 bp, Sus scrofa
gtggattctgttccccaagt

SEQ ID NO: 4443 - DNA, 20 bp, Sus scrofa
cgggaccatgggccaacttg

SEQ ID NO: 4444 - DNA, 20 bp, Sus scrofa
acgggaccatgggccaactt

SEQ ID NO: 4445 - DNA, 20 bp, Sus scrofa
cacgggaccatgggccaact

SEQ ID NO: 4446 - DNA, 20 bp, Sus scrofa
ctgttccccaagttggccca

SEQ ID NO: 4447 - DNA, 20 bp, Sus scrofa
cttgggcatcacgggaccat

SEQ ID NO: 4448 - DNA, 20 bp, Sus scrofa
ccttgggcatcacgggacca

SEQ ID NO: 4449 - DNA, 20 bp, Sus scrofa
ccctcctccttgggcatcac

SEQ ID NO: 4450 - DNA, 20 bp, Sus scrofa
gccctcctccttgggcatca

SEQ ID NO: 4451 - DNA, 20 bp, Sus scrofa
ccatggtcccgtgatgccca

SEQ ID NO: 4452 - DNA, 20 bp, Sus scrofa
tggtcccgtgatgcccaagg

SEQ ID NO: 4453 - DNA, 20 bp, Sus scrofa
gccaagatgccctcctcctt

SEQ ID NO: 4454 - DNA, 20 bp, Sus scrofa
tcccgtgatgcccaaggagg

SEQ ID NO: 4455 - DNA, 20 bp, Sus scrofa
tgccaagatgccctcctcct

SEQ ID NO: 4456 - DNA, 20 bp, Sus scrofa
cccgtgatgcccaaggagga

SEQ ID NO: 4457 - DNA, 20 bp, Sus scrofa
gcccaaggaggagggcatct

SEQ ID NO: 4458 - DNA, 20 bp, Sus scrofa
agcttcttcctgaagggctc

SEQ ID NO: 4459 - DNA, 20 bp, Sus scrofa
acagtcttcctgagcccttc

SEQ ID NO: 4460 - DNA, 20 bp, Sus scrofa
ctgaccagcttcttcctgaa

SEQ ID NO: 4461 - DNA, 20 bp, Sus scrofa
tctgaccagcttcttcctga

SEQ ID NO: 4462 - DNA, 20 bp, Sus scrofa
tgagcccttcaggaagaagc

SEQ ID NO: 4463 - DNA, 20 bp, Sus scrofa
ctccctgcctctgagcaggc

SEQ ID NO: 4464 - DNA, 20 bp, Sus scrofa
ggtcagaccagcctgctcag

SEQ ID NO: 4465 - DNA, 20 bp, Sus scrofa
gctgctccctgcctctgagc

SEQ ID NO: 4466 - DNA, 20 bp, Sus scrofa
agaccagcctgctcagaggc

SEQ ID NO: 4467 - DNA, 20 bp, Sus scrofa
gaccagcctgctcagaggca

SEQ ID NO: 4468 - DNA, 20 bp, Sus scrofa
ggcagggagcagccccagac

SEQ ID NO: 4469 - DNA, 20 bp, Sus scrofa
gcagggagcagccccagaca

SEQ ID NO: 4470 - DNA, 20 bp, Sus scrofa
ttctaaccagtccctgtctg

SEQ ID NO: 4471 - DNA, 20 bp, Sus scrofa
attctaaccagtccctgtct

SEQ ID NO: 4472 - DNA, 20 bp, Sus scrofa
tattctaaccagtccctgtc

SEQ ID NO: 4473 - DNA, 20 bp, Sus scrofa
gagcagccccagacagggac

SEQ ID NO: 4474 - DNA, 20 bp, Sus scrofa
agacagggactggttagaat

SEQ ID NO: 4475 - DNA, 20 bp, Sus scrofa
ctcctcacggataagtagac

SEQ ID NO: 4476 - DNA, 20 bp, Sus scrofa
ggcctgtctacttatccgtg

SEQ ID NO: 4477 - DNA, 20 bp, Sus scrofa
ctcatagccttttctcctca

SEQ ID NO: 4478 - DNA, 20 bp, Sus scrofa
tacttatccgtgaggagaaa

SEQ ID NO: 4479 - DNA, 20 bp, Sus scrofa
cgtgaggagaaaaggctatg

SEQ ID NO: 4480 - DNA, 20 bp, Sus scrofa
gtgaggagaaaaggctatga

SEQ ID NO: 4481 - DNA, 20 bp, Sus scrofa
tgaggagaaaaggctatgag

SEQ ID NO: 4482 - DNA, 20 bp, Sus scrofa
gagaaaaggctatgaggggc

SEQ ID NO: 4483 - DNA, 20 bp, Sus scrofa
gaatgacaatgctattgaga

SEQ ID NO: 4484 - DNA, 20 bp, Sus scrofa
acaatgctattgagaaggac

SEQ ID NO: 4485 - DNA, 20 bp, Sus scrofa
cacccctggtcacatggcac

SEQ ID NO: 4486 - DNA, 20 bp, Sus scrofa
atttctcacccctggtcaca

SEQ ID NO: 4487 - DNA, 20 bp, Sus scrofa
caggcctgtgccatgtgacc

SEQ ID NO: 4488 - DNA, 20 bp, Sus scrofa
aggcctgtgccatgtgacca

SEQ ID NO: 4489 - DNA, 20 bp, Sus scrofa
ggcctgtgccatgtgaccag

SEQ ID NO: 4490 - DNA, 20 bp, Sus scrofa
cggtttgcatttctcacccc

SEQ ID NO: 4491 - DNA, 20 bp, Sus scrofa
caggggtgagaaatgcaaac

SEQ ID NO: 4492 - DNA, 20 bp, Sus scrofa
gggtgagaaatgcaaaccgg

SEQ ID NO: 4493 - DNA, 20 bp, Sus scrofa
ggtgagaaatgcaaaccggt

SEQ ID NO: 4494 - DNA, 20 bp, Sus scrofa
actgatgcccacatacccac

SEQ ID NO: 4495 - DNA, 20 bp, Sus scrofa
aatgcaaaccggtgggtatg

SEQ ID NO: 4496 - DNA, 20 bp, Sus scrofa
atgcaaaccggtgggtatgt

SEQ ID NO: 4497 - DNA, 20 bp, Sus scrofa
catcagtacatgtttcctag

SEQ ID NO: 4498 - DNA, 20 bp, Sus scrofa
gcctgctccttgcagcctct

SEQ ID NO: 4499 - DNA, 20 bp, Sus scrofa
catgtttcctagaggctgca

SEQ ID NO: 4500 - DNA, 20 bp, Sus scrofa
tcctagaggctgcaaggagc

SEQ ID NO: 4501 - DNA, 20 bp, Sus scrofa
agaggctgcaaggagcaggc

SEQ ID NO: 4502 - DNA, 20 bp, Sus scrofa
ggctgcaaggagcaggcagg

SEQ ID NO: 4503 - DNA, 20 bp, Sus scrofa
gctgcaaggagcaggcaggt

SEQ ID NO: 4504 - DNA, 20 bp, Sus scrofa
ctgcaaggagcaggcaggtg

SEQ ID NO: 4505 - DNA, 20 bp, Sus scrofa
gggatactatgtcgagcacc

SEQ ID NO: 4506 - DNA, 20 bp, Sus scrofa
tgatccctcctggtggcacc

SEQ ID NO: 4507 - DNA, 20 bp, Sus scrofa
gtcgagcaccaggtgccacc

SEQ ID NO: 4508 - DNA, 20 bp, Sus scrofa
gagcaccaggtgccaccagg

SEQ ID NO: 4509 - DNA, 20 bp, Sus scrofa
agcaccaggtgccaccagga

SEQ ID NO: 4510 - DNA, 20 bp, Sus scrofa
ttaaaggtgatccctcctgg

SEQ ID NO: 4511 - DNA, 20 bp, Sus scrofa
accttaaaggtgatccctcc

SEQ ID NO: 4512 - DNA, 20 bp, Sus scrofa
accaggagggatcaccttta

SEQ ID NO: 4513 - DNA, 20 bp, Sus scrofa
agggcctgcagggaccttaa

SEQ ID NO: 4514 - DNA, 20 bp, Sus scrofa
atcacctttaaggtccctgc

SEQ ID NO: 4515 - DNA, 20 bp, Sus scrofa
ctgggcttccagggcctgca

SEQ ID NO: 4516 - DNA, 20 bp, Sus scrofa
cctgggcttccagggcctgc

SEQ ID NO: 4517 - DNA, 20 bp, Sus scrofa
tttaaggtccctgcaggccc

SEQ ID NO: 4518 - DNA, 20 bp, Sus scrofa
ggctgctccctgggcttcca

SEQ ID NO: 4519 - DNA, 20 bp, Sus scrofa
gggctgctccctgggcttcc

SEQ ID NO: 4520 - DNA, 20 bp, Sus scrofa
cctgcaggccctggaagccc

SEQ ID NO: 4521 - DNA, 20 bp, Sus scrofa
ctgcaggccctggaagccca

SEQ ID NO: 4522 - DNA, 20 bp, Sus scrofa
ctgatcgggggctgctccct

SEQ ID NO: 4523 - DNA, 20 bp, Sus scrofa
gctgatcgggggctgctccc

SEQ ID NO: 4524 - DNA, 20 bp, Sus scrofa
tcctgttccaagctgatcgg

SEQ ID NO: 4525 - DNA, 20 bp, Sus scrofa
ctcctgttccaagctgatcg

SEQ ID NO: 4526 - DNA, 20 bp, Sus scrofa
actcctgttccaagctgatc

SEQ ID NO: 4527 - DNA, 20 bp, Sus scrofa
cactcctgttccaagctgat

SEQ ID NO: 4528 - DNA, 20 bp, Sus scrofa
ggagcagcccccgatcagct

SEQ ID NO: 4529 - DNA, 20 bp, Sus scrofa
gcccccgatcagcttggaac

SEQ ID NO: 4530 - DNA, 20 bp, Sus scrofa
cgatcagcttggaacaggag

SEQ ID NO: 4531 - DNA, 20 bp, Sus scrofa
ggaacaggagtggaaaactc

SEQ ID NO: 4532 - DNA, 20 bp, Sus scrofa
gaaaactctggtcatccacc

SEQ ID NO: 4533 - DNA, 20 bp, Sus scrofa
agggtgcccgcttctccagg

SEQ ID NO: 4534 - DNA, 20 bp, Sus scrofa
gccagggtgcccgcttctcc

SEQ ID NO: 4535 - DNA, 20 bp, Sus scrofa
tggtcatccacctggagaag

SEQ ID NO: 4536 - DNA, 20 bp, Sus scrofa
ggtcatccacctggagaagc

SEQ ID NO: 4537 - DNA, 20 bp, Sus scrofa
acctggagaagcgggcaccc

SEQ ID NO: 4538 - DNA, 20 bp, Sus scrofa
ggagtcagcaagggaggcca

SEQ ID NO: 4539 - DNA, 20 bp, Sus scrofa
gggagtcagcaagggaggcc

SEQ ID NO: 4540 - DNA, 20 bp, Sus scrofa
cccaggggagtcagcaaggg

SEQ ID NO: 4541 - DNA, 20 bp, Sus scrofa
tgacccaggggagtcagcaa

SEQ ID NO: 4542 - DNA, 20 bp, Sus scrofa
atgacccaggggagtcagca

SEQ ID NO: 4543 - DNA, 20 bp, Sus scrofa
gcctcccttgctgactcccc

SEQ ID NO: 4544 - DNA, 20 bp, Sus scrofa
cctcccttgctgactcccct

SEQ ID NO: 4545 - DNA, 20 bp, Sus scrofa
tcaggcctgaaatgacccag

SEQ ID NO: 4546 - DNA, 20 bp, Sus scrofa
ctcaggcctgaaatgaccca

SEQ ID NO: 4547 - DNA, 20 bp, Sus scrofa
tctcaggcctgaaatgaccc

SEQ ID NO: 4548 - DNA, 20 bp, Sus scrofa
tgactcccctgggtcatttc

SEQ ID NO: 4549 - DNA, 20 bp, Sus scrofa
aggaagagtcatcaggtctc

SEQ ID NO: 4550 - DNA, 20 bp, Sus scrofa
atggctgaggaagagtcatc

SEQ ID NO: 4551 - DNA, 20 bp, Sus scrofa
aggtggtgtggagatggctg

SEQ ID NO: 4552 - DNA, 20 bp, Sus scrofa
cagcacaggtggtgtggaga

SEQ ID NO: 4553 - DNA, 20 bp, Sus scrofa
tggctccagcacaggtggtg

SEQ ID NO: 4554 - DNA, 20 bp, Sus scrofa
tgtcctggctccagcacagg

SEQ ID NO: 4555 - DNA, 20 bp, Sus scrofa
catctccacaccacctgtgc

SEQ ID NO: 4556 - DNA, 20 bp, Sus scrofa
gcatgtcctggctccagcac

SEQ ID NO: 4557 - DNA, 20 bp, Sus scrofa
acaccacctgtgctggagcc

SEQ ID NO: 4558 - DNA, 20 bp, Sus scrofa
acctggctgaaggcatgtcc

SEQ ID NO: 4559 - DNA, 20 bp, Sus scrofa
gccaggacatgccttcagcc

SEQ ID NO: 4560 - DNA, 20 bp, Sus scrofa
taaaaggcagacctggctga

SEQ ID NO: 4561 - DNA, 20 bp, Sus scrofa
tcgctgttaaaaggcagacc

SEQ ID NO: 4562 - DNA, 20 bp, Sus scrofa
ccgtctcattcgctgttaaa

SEQ ID NO: 4563 - DNA, 20 bp, Sus scrofa
ccttttaacagcgaatgaga

SEQ ID NO: 4564 - DNA, 20 bp, Sus scrofa
tacctcctttatttcgaatg

SEQ ID NO: 4565 - DNA, 20 bp, Sus scrofa
ttctacctcattcgaaataa

SEQ ID NO: 4566 - DNA, 20 bp, Sus scrofa
tacctcattcgaaataaagg

SEQ ID NO: 4567 - DNA, 20 bp, Sus scrofa
tcattcgaaataaaggaggt

SEQ ID NO: 4568 - DNA, 20 bp, Sus scrofa
cattcgaaataaaggaggta

SEQ ID NO: 4569 - DNA, 20 bp, Sus scrofa
tctcatcttacctacaatct

SEQ ID NO: 4570 - DNA, 20 bp, Sus scrofa
ggaggtagggcccagattgt

SEQ ID NO: 4571 - DNA, 20 bp, Sus scrofa
ttctcatcttacctacaatc

SEQ ID NO: 4572 - DNA, 20 bp, Sus scrofa
attgtaggtaagatgagaag

SEQ ID NO: 4573 - DNA, 20 bp, Sus scrofa
ttgtaggtaagatgagaaga

SEQ ID NO: 4574 - DNA, 20 bp, Sus scrofa
tgtaggtaagatgagaagag

SEQ ID NO: 4575 - DNA, 20 bp, Sus scrofa
ggaatctaagaactcttaac

SEQ ID NO: 4576 - DNA, 20 bp, Sus scrofa
gaatctaagaactcttaaca

SEQ ID NO: 4577 - DNA, 20 bp, Sus scrofa
aacagggcaaaatcacctcc

SEQ ID NO: 4578 - DNA, 20 bp, Sus scrofa
acagggcaaaatcacctcca

SEQ ID NO: 4579 - DNA, 20 bp, Sus scrofa
gggcaaaatcacctccaggg

SEQ ID NO: 4580 - DNA, 20 bp, Sus scrofa
cacccccgccaccaccctgg

SEQ ID NO: 4581 - DNA, 20 bp, Sus scrofa
caaaatcacctccagggtgg

SEQ ID NO: 4582 - DNA, 20 bp, Sus scrofa
tcccacccccgccaccaccc

SEQ ID NO: 4583 - DNA, 20 bp, Sus scrofa
aatcacctccagggtggtgg

SEQ ID NO: 4584 - DNA, 20 bp, Sus scrofa
atcacctccagggtggtggc

SEQ ID NO: 4585 - DNA, 20 bp, Sus scrofa
tcacctccagggtggtggcg

SEQ ID NO: 4586 - DNA, 20 bp, Sus scrofa
cacctccagggtggtggcgg

SEQ ID NO: 4587 - DNA, 20 bp, Sus scrofa
ctccagggtggtggcggggg

SEQ ID NO: 4588 - DNA, 20 bp, Sus scrofa
tccagggtggtggcgggggt

SEQ ID NO: 4589 - DNA, 20 bp, Sus scrofa
ggtggtggcgggggtgggag

SEQ ID NO: 4590 - DNA, 20 bp, Sus scrofa
gtggtggcgggggtgggagt

SEQ ID NO: 4591 - DNA, 20 bp, Sus scrofa
tggtggcgggggtgggagtg

SEQ ID NO: 4592 - DNA, 20 bp, Sus scrofa
cgggggtgggagtggggtca

SEQ ID NO: 4593 - DNA, 20 bp, Sus scrofa
gagtggggtcatggcacgcg

SEQ ID NO: 4594 - DNA, 20 bp, Sus scrofa
ggtctttggaggcacttctg

SEQ ID NO: 4595 - DNA, 20 bp, Sus scrofa
gtccaaaagttggtctttgg

SEQ ID NO: 4596 - DNA, 20 bp, Sus scrofa
aaagtccaaaagttggtctt

SEQ ID NO: 4597 - DNA, 20 bp, Sus scrofa
tgcctccaaagaccaacttt

SEQ ID NO: 4598 - DNA, 20 bp, Sus scrofa
ggtcggcaaagtccaaaagt

SEQ ID NO: 4599 - DNA, 20 bp, Sus scrofa
ccgcagagaaatgctcaggt

SEQ ID NO: 4600 - DNA, 20 bp, Sus scrofa
ggccccgcagagaaatgctc

SEQ ID NO: 4601 - DNA, 20 bp, Sus scrofa
ccgacctgagcatttctctg

SEQ ID NO: 4602 - DNA, 20 bp, Sus scrofa
cgacctgagcatttctctgc

SEQ ID NO: 4603 - DNA, 20 bp, Sus scrofa
gacctgagcatttctctgcg

SEQ ID NO: 4604 - DNA, 20 bp, Sus scrofa
atttctctgcggggccatcc

SEQ ID NO: 4605 - DNA, 20 bp, Sus scrofa
tttctctgcggggccatcct

SEQ ID NO: 4606 - DNA, 20 bp, Sus scrofa
gaacgtccacaaacccagga

SEQ ID NO: 4607 - DNA, 20 bp, Sus scrofa
gaatgaacgtccacaaaccc

SEQ ID NO: 4608 - DNA, 20 bp, Sus scrofa
gcggggccatcctgggtttg

SEQ ID NO: 4609 - DNA, 20 bp, Sus scrofa
gtcctaagagtagaggtgga

SEQ ID NO: 4610 - DNA, 20 bp, Sus scrofa
cagagtcctaagagtagagg

SEQ ID NO: 4611 - DNA, 20 bp, Sus scrofa
ctgcagagtcctaagagtag

SEQ ID NO: 4612 - DNA, 20 bp, Sus scrofa
ctccttccacctctactctt

SEQ ID NO: 4613 - DNA, 20 bp, Sus scrofa
ctgcagagaaagtctagtgc

SEQ ID NO: 4614 - DNA, 20 bp, Sus scrofa
tgcagagaaagtctagtgct

SEQ ID NO: 4615 - DNA, 20 bp, Sus scrofa
tgctgggatattattccata

SEQ ID NO: 4616 - DNA, 20 bp, Sus scrofa
gacacatacaagctaccata

SEQ ID NO: 4617 - DNA, 20 bp, Sus scrofa
cagtcactgaggtgagactg

SEQ ID NO: 4618 - DNA, 20 bp, Sus scrofa
ctagccacatgcagtcactg

SEQ ID NO: 4619 - DNA, 20 bp, Sus scrofa
ctcacctcagtgactgcatg

SEQ ID NO: 4620 - DNA, 20 bp, Sus scrofa
gtggctagtcactcctccct

SEQ ID NO: 4621 - DNA, 20 bp, Sus scrofa
tagaacttcctgtccaaggg

SEQ ID NO: 4622 - DNA, 20 bp, Sus scrofa
tagtcactcctcccttggac

SEQ ID NO: 4623 - DNA, 20 bp, Sus scrofa
cagtagaacttcctgtccaa

SEQ ID NO: 4624 - DNA, 20 bp, Sus scrofa
ccagtagaacttcctgtcca

SEQ ID NO: 4625 - DNA, 20 bp, Sus scrofa
ccttggacaggaagttctac

SEQ ID NO: 4626 - DNA, 20 bp, Sus scrofa
cttggacaggaagttctact

SEQ ID NO: 4627 - DNA, 20 bp, Sus scrofa
gaagttctactgggcagtgc

SEQ ID NO: 4628 - DNA, 20 bp, Sus scrofa
tagagaacagtgagtcagag

SEQ ID NO: 4629 - DNA, 20 bp, Sus scrofa
agagaacagtgagtcagaga

SEQ ID NO: 4630 - DNA, 20 bp, Sus scrofa
agtgagtcagagagggtccc

SEQ ID NO: 4631 - DNA, 20 bp, Sus scrofa
agagcaagggcagcggacca

SEQ ID NO: 4632 - DNA, 20 bp, Sus scrofa
cagagcaagggcagcggacc

SEQ ID NO: 4633 - DNA, 20 bp, Sus scrofa
ctgccccagagcaagggcag

SEQ ID NO: 4634 - DNA, 20 bp, Sus scrofa
ctggtccgctgcccttgctc

SEQ ID NO: 4635 - DNA, 20 bp, Sus scrofa
actggcctgccccagagcaa

SEQ ID NO: 4636 - DNA, 20 bp, Sus scrofa
tggtccgctgcccttgctct

SEQ ID NO: 4637 - DNA, 20 bp, Sus scrofa
tactggcctgccccagagca

SEQ ID NO: 4638 - DNA, 20 bp, Sus scrofa
ggtccgctgcccttgctctg

SEQ ID NO: 4639 - DNA, 20 bp, Sus scrofa
cgctgcccttgctctggggc

SEQ ID NO: 4640 - DNA, 20 bp, Sus scrofa
tcatcacctggtcactgtac

SEQ ID NO: 4641 - DNA, 20 bp, Sus scrofa
ggcaggccagtacagtgacc

SEQ ID NO: 4642 - DNA, 20 bp, Sus scrofa
gccatcaggcattcatcacc

SEQ ID NO: 4643 - DNA, 20 bp, Sus scrofa
accaggtgatgaatgcctga

SEQ ID NO: 4644 - DNA, 20 bp, Sus scrofa
ggtgatgaatgcctgatggc

SEQ ID NO: 4645 - DNA, 20 bp, Sus scrofa
tcttacctgcccctgccatc

SEQ ID NO: 4646 - DNA, 20 bp, Sus scrofa
gtgatgaatgcctgatggca

SEQ ID NO: 4647 - DNA, 20 bp, Sus scrofa
tgatgaatgcctgatggcag

SEQ ID NO: 4648 - DNA, 20 bp, Sus scrofa
gaatgcctgatggcaggggc

SEQ ID NO: 4649 - DNA, 20 bp, Sus scrofa
ggcaggtaagagcaagcatg

SEQ ID NO: 4650 - DNA, 20 bp, Sus scrofa
gcaggtaagagcaagcatgc

SEQ ID NO: 4651 - DNA, 20 bp, Sus scrofa
ggtaagagcaagcatgcggg

SEQ ID NO: 4652 - DNA, 20 bp, Sus scrofa
gtaagagcaagcatgcgggt

SEQ ID NO: 4653 - DNA, 20 bp, Sus scrofa
gcaagcatgcgggtgggtct

SEQ ID NO: 4654 - DNA, 20 bp, Sus scrofa
caagcatgcgggtgggtctc

SEQ ID NO: 4655 - DNA, 20 bp, Sus scrofa
gtgaccttctgcggtcagat

SEQ ID NO: 4656 - DNA, 20 bp, Sus scrofa
tgtgaccttctgcggtcaga

SEQ ID NO: 4657 - DNA, 20 bp, Sus scrofa
gggacccatctgaccgcaga

SEQ ID NO: 4658 - DNA, 20 bp, Sus scrofa
tgtgtgtctgtgaccttctg

SEQ ID NO: 4659 - DNA, 20 bp, Sus scrofa
gcagaaggtcacagacacac

SEQ ID NO: 4660 - DNA, 20 bp, Sus scrofa
gtcacagacacacaggtgaa

SEQ ID NO: 4661 - DNA, 20 bp, Sus scrofa
tcacagacacacaggtgaaa

SEQ ID NO: 4662 - DNA, 20 bp, Sus scrofa
acacacaggtgaaagggcag

SEQ ID NO: 4663 - DNA, 20 bp, Sus scrofa
cacacaggtgaaagggcagt

SEQ ID NO: 4664 - DNA, 20 bp, Sus scrofa
acacaggtgaaagggcagtg

SEQ ID NO: 4665 - DNA, 20 bp, Sus scrofa
cacaggtgaaagggcagtgg

SEQ ID NO: 4666 - DNA, 20 bp, Sus scrofa
tgaaagggcagtgggggctg

SEQ ID NO: 4667 - DNA, 20 bp, Sus scrofa
agggcagtgggggctgagga

SEQ ID NO: 4668 - DNA, 20 bp, Sus scrofa
gggcagtgggggctgaggat

SEQ ID NO: 4669 - DNA, 20 bp, Sus scrofa
ggctgaggatgggaagaagt

SEQ ID NO: 4670 - DNA, 20 bp, Sus scrofa
gatgggaagaagtaggtccc

SEQ ID NO: 4671 - DNA, 20 bp, Sus scrofa
tggccatgttcctgaagcca

SEQ ID NO: 4672 - DNA, 20 bp, Sus scrofa
agaagtaggtccctggcttc

SEQ ID NO: 4673 - DNA, 20 bp, Sus scrofa
ctggccatgttcctgaagcc

SEQ ID NO: 4674 - DNA, 20 bp, Sus scrofa
ggtccctggcttcaggaaca

SEQ ID NO: 4675 - DNA, 20 bp, Sus scrofa
ctggcttcaggaacatggcc

SEQ ID NO: 4676 - DNA, 20 bp, Sus scrofa
tcaggaacatggccaggccg

SEQ ID NO: 4677 - DNA, 20 bp, Sus scrofa
tgccccgtgtggcctcggcc

SEQ ID NO: 4678 - DNA, 20 bp, Sus scrofa
ctcagtgccccgtgtggcct

SEQ ID NO: 4679 - DNA, 20 bp, Sus scrofa
atggccaggccgaggccaca

SEQ ID NO: 4680 - DNA, 20 bp, Sus scrofa
tggccaggccgaggccacac

SEQ ID NO: 4681 - DNA, 20 bp, Sus scrofa
ggccaggccgaggccacacg

SEQ ID NO: 4682 - DNA, 20 bp, Sus scrofa
tctcatctcagtgccccgtg

SEQ ID NO: 4683 - DNA, 20 bp, Sus scrofa
acacggggcactgagatgag

SEQ ID NO: 4684 - DNA, 20 bp, Sus scrofa
agaggctctgacagaatgac

SEQ ID NO: 4685 - DNA, 20 bp, Sus scrofa
gaggctctgacagaatgaca

SEQ ID NO: 4686 - DNA, 20 bp, Sus scrofa
gacagaatgacagggcccag

SEQ ID NO: 4687 - DNA, 20 bp, Sus scrofa
cacgttgttaggcaacctct

SEQ ID NO: 4688 - DNA, 20 bp, Sus scrofa
tcacgttgttaggcaacctc

SEQ ID NO: 4689 - DNA, 20 bp, Sus scrofa
atgccagacatcacgttgtt

SEQ ID NO: 4690 - DNA, 20 bp, Sus scrofa
ttgcctaacaacgtgatgtc

SEQ ID NO: 4691 - DNA, 20 bp, Sus scrofa
taacaacgtgatgtctggca

SEQ ID NO: 4692 - DNA, 20 bp, Sus scrofa
caacgtgatgtctggcatgg

SEQ ID NO: 4693 - DNA, 20 bp, Sus scrofa
aacgtgatgtctggcatggt

SEQ ID NO: 4694 - DNA, 20 bp, Sus scrofa
acgtgatgtctggcatggtg

SEQ ID NO: 4695 - DNA, 20 bp, Sus scrofa
tgtctggcatggtggggagc

SEQ ID NO: 4696 - DNA, 20 bp, Sus scrofa
gtctggcatggtggggagct

SEQ ID NO: 4697 - DNA, 20 bp, Sus scrofa
tctggcatggtggggagctg

SEQ ID NO: 4698 - DNA, 20 bp, Sus scrofa
ctggcatggtggggagctgg

SEQ ID NO: 4699 - DNA, 20 bp, Sus scrofa
ctgggggttttattgttcaa

SEQ ID NO: 4700 - DNA, 20 bp, Sus scrofa
ttttattgttcaatggaatt

SEQ ID NO: 4701 - DNA, 20 bp, Sus scrofa
caatggaatttggaagaatg

SEQ ID NO: 4702 - DNA, 20 bp, Sus scrofa
atttggaagaatgtggcagt

SEQ ID NO: 4703 - DNA, 20 bp, Sus scrofa
tttggaagaatgtggcagtt

SEQ ID NO: 4704 - DNA, 20 bp, Sus scrofa
tcgataaacccaactgctgt

SEQ ID NO: 4705 - DNA, 20 bp, Sus scrofa
tgggtcttgccgacagcagt

SEQ ID NO: 4706 - DNA, 20 bp, Sus scrofa
gggtcttgccgacagcagtt

SEQ ID NO: 4707 - DNA, 20 bp, Sus scrofa
cgccaggagcctgactggac

SEQ ID NO: 4708 - DNA, 20 bp, Sus scrofa
ttgctttctccagtccagtc

SEQ ID NO: 4709 - DNA, 20 bp, Sus scrofa
tcccccgccaggagcctgac

SEQ ID NO: 4710 - DNA, 20 bp, Sus scrofa
ctccagtccagtcaggctcc

SEQ ID NO: 4711 - DNA, 20 bp, Sus scrofa
cagtccagtcaggctcctgg

SEQ ID NO: 4712 - DNA, 20 bp, Sus scrofa
agtccagtcaggctcctggc

SEQ ID NO: 4713 - DNA, 20 bp, Sus scrofa
gtccagtcaggctcctggcg

SEQ ID NO: 4714 - DNA, 20 bp, Sus scrofa
tccagtcaggctcctggcgg

SEQ ID NO: 4715 - DNA, 20 bp, Sus scrofa
ggtccccccactcccccgcc

SEQ ID NO: 4716 - DNA, 20 bp, Sus scrofa
tcaggctcctggcgggggag

SEQ ID NO: 4717 - DNA, 20 bp, Sus scrofa
caggctcctggcgggggagt

SEQ ID NO: 4718 - DNA, 20 bp, Sus scrofa
aggctcctggcgggggagtg

SEQ ID NO: 4719 - DNA, 20 bp, Sus scrofa
ggctcctggcgggggagtgg

SEQ ID NO: 4720 - DNA, 20 bp, Sus scrofa
gctcctggcgggggagtggg

SEQ ID NO: 4721 - DNA, 20 bp, Sus scrofa
gggggagtggggggacctcc

SEQ ID NO: 4722 - DNA, 20 bp, Sus scrofa
gagcagagctgcaaaccagg

SEQ ID NO: 4723 - DNA, 20 bp, Sus scrofa
cgtgagcagagctgcaaacc

SEQ ID NO: 4724 - DNA, 20 bp, Sus scrofa
tttgcagctctgctcacgcc

SEQ ID NO: 4725 - DNA, 20 bp, Sus scrofa
ttgcagctctgctcacgcca

SEQ ID NO: 4726 - DNA, 20 bp, Sus scrofa
actgtggggaggggggtccc

SEQ ID NO: 4727 - DNA, 20 bp, Sus scrofa
tagcaacactgtggggaggg

SEQ ID NO: 4728 - DNA, 20 bp, Sus scrofa
gtagcaacactgtggggagg

SEQ ID NO: 4729 - DNA, 20 bp, Sus scrofa
tgtagcaacactgtggggag

SEQ ID NO: 4730 - DNA, 20 bp, Sus scrofa
ctgtagcaacactgtgggga

SEQ ID NO: 4731 - DNA, 20 bp, Sus scrofa
cctgtagcaacactgtgggg

SEQ ID NO: 4732 - DNA, 20 bp, Sus scrofa
ctgcctgtagcaacactgtg

SEQ ID NO: 4733 - DNA, 20 bp, Sus scrofa
tctgcctgtagcaacactgt

SEQ ID NO: 4734 - DNA, 20 bp, Sus scrofa
ttctgcctgtagcaacactg

SEQ ID NO: 4735 - DNA, 20 bp, Sus scrofa
cctccccacagtgttgctac

SEQ ID NO: 4736 - DNA, 20 bp, Sus scrofa
gttgctacaggcagaaagcc

SEQ ID NO: 4737 - DNA, 20 bp, Sus scrofa
ttgctacaggcagaaagcct

SEQ ID NO: 4738 - DNA, 20 bp, Sus scrofa
tgctacaggcagaaagcctg

SEQ ID NO: 4739 - DNA, 20 bp, Sus scrofa
tacaggcagaaagcctgggg

SEQ ID NO: 4740 - DNA, 20 bp, Sus scrofa
acaggcagaaagcctggggt

SEQ ID NO: 4741 - DNA, 20 bp, Sus scrofa
gcagagccagagcccacccc

SEQ ID NO: 4742 - DNA, 20 bp, Sus scrofa
agaaagcctggggtgggctc

SEQ ID NO: 4743 - DNA, 20 bp, Sus scrofa
cagaaggcacctctagagca

SEQ ID NO: 4744 - DNA, 20 bp, Sus scrofa
ctggctctgccatgctctag

SEQ ID NO: 4745 - DNA, 20 bp, Sus scrofa
catgctctagaggtgccttc

SEQ ID NO: 4746 - DNA, 20 bp, Sus scrofa
gggacaggaggcagaccaga

SEQ ID NO: 4747 - DNA, 20 bp, Sus scrofa
aagaccggggaggggacagg

SEQ ID NO: 4748 - DNA, 20 bp, Sus scrofa
cccaagaccggggaggggac

SEQ ID NO: 4749 - DNA, 20 bp, Sus scrofa
tctgcctcctgtcccctccc

SEQ ID NO: 4750 - DNA, 20 bp, Sus scrofa
tggggcccaagaccggggag

SEQ ID NO: 4751 - DNA, 20 bp, Sus scrofa
atggggcccaagaccgggga

SEQ ID NO: 4752 - DNA, 20 bp, Sus scrofa
aatggggcccaagaccgggg

SEQ ID NO: 4753 - DNA, 20 bp, Sus scrofa
tcctgtcccctccccggtct

SEQ ID NO: 4754 - DNA, 20 bp, Sus scrofa
aggaatggggcccaagaccg

SEQ ID NO: 4755 - DNA, 20 bp, Sus scrofa
cctgtcccctccccggtctt

SEQ ID NO: 4756 - DNA, 20 bp, Sus scrofa
gaggaatggggcccaagacc

SEQ ID NO: 4757 - DNA, 20 bp, Sus scrofa
tgaggaatggggcccaagac

SEQ ID NO: 4758 - DNA, 20 bp, Sus scrofa
cgtgaatggggtgaggaatg

SEQ ID NO: 4759 - DNA, 20 bp, Sus scrofa
gcgtgaatggggtgaggaat

SEQ ID NO: 4760 - DNA, 20 bp, Sus scrofa
ggcgtgaatggggtgaggaa

SEQ ID NO: 4761 - DNA, 20 bp, Sus scrofa
aggccggcgtgaatggggtg

SEQ ID NO: 4762 - DNA, 20 bp, Sus scrofa
agacaaggccggcgtgaatg

SEQ ID NO: 4763 - DNA, 20 bp, Sus scrofa
aagacaaggccggcgtgaat

SEQ ID NO: 4764 - DNA, 20 bp, Sus scrofa
aaagacaaggccggcgtgaa

SEQ ID NO: 4765 - DNA, 20 bp, Sus scrofa
attcctcaccccattcacgc

SEQ ID NO: 4766 - DNA, 20 bp, Sus scrofa
taagaaggtaaatagagcgc

SEQ ID NO: 4767 - DNA, 20 bp, Sus scrofa
gaaggtaaatagagcgcagg

SEQ ID NO: 4768 - DNA, 20 bp, Sus scrofa
aaggtaaatagagcgcagga

SEQ ID NO: 4769 - DNA, 20 bp, Sus scrofa
aggtaaatagagcgcaggag

SEQ ID NO: 4770 - DNA, 20 bp, Sus scrofa
agcgcaggaggggctatgcc

SEQ ID NO: 4771 - DNA, 20 bp, Sus scrofa
gcgcaggaggggctatgccc

SEQ ID NO: 4772 - DNA, 20 bp, Sus scrofa
caggaggggctatgcccggg

SEQ ID NO: 4773 - DNA, 20 bp, Sus scrofa
ggggaactggcaggcctccc

SEQ ID NO: 4774 - DNA, 20 bp, Sus scrofa
cggggaactggcaggcctcc

SEQ ID NO: 4775 - DNA, 20 bp, Sus scrofa
cacaggctcggggaactggc

SEQ ID NO: 4776 - DNA, 20 bp, Sus scrofa
cgcacacaggctcggggaac

SEQ ID NO: 4777 - DNA, 20 bp, Sus scrofa
ggctcccgcacacaggctcg

SEQ ID NO: 4778 - DNA, 20 bp, Sus scrofa
tggctcccgcacacaggctc

SEQ ID NO: 4779 - DNA, 20 bp, Sus scrofa
ctggctcccgcacacaggct

SEQ ID NO: 4780 - DNA, 20 bp, Sus scrofa
cagttccccgagcctgtgtg

SEQ ID NO: 4781 - DNA, 20 bp, Sus scrofa
agttccccgagcctgtgtgc

SEQ ID NO: 4782 - DNA, 20 bp, Sus scrofa
agggcctggctcccgcacac

SEQ ID NO: 4783 - DNA, 20 bp, Sus scrofa
cgagcctgtgtgcgggagcc

SEQ ID NO: 4784 - DNA, 20 bp, Sus scrofa
aggccctgggctcaagggcc

SEQ ID NO: 4785 - DNA, 20 bp, Sus scrofa
aacgaaggccctgggctcaa

SEQ ID NO: 4786 - DNA, 20 bp, Sus scrofa
taacgaaggccctgggctca

SEQ ID NO: 4787 - DNA, 20 bp, Sus scrofa
ggagccaggcccttgagccc

SEQ ID NO: 4788 - DNA, 20 bp, Sus scrofa
gagccaggcccttgagccca

SEQ ID NO: 4789 - DNA, 20 bp, Sus scrofa
cttacaataacgaaggccct

SEQ ID NO: 4790 - DNA, 20 bp, Sus scrofa
tcttacaataacgaaggccc

SEQ ID NO: 4791 - DNA, 20 bp, Sus scrofa
aagagctcttacaataacga

SEQ ID NO: 4792 - DNA, 20 bp, Sus scrofa
agttcaagctaaacggggca

SEQ ID NO: 4793 - DNA, 20 bp, Sus scrofa
tagttcaagctaaacggggc

SEQ ID NO: 4794 - DNA, 20 bp, Sus scrofa
cacttagttcaagctaaacg

SEQ ID NO: 4795 - DNA, 20 bp, Sus scrofa
tcacttagttcaagctaaac

SEQ ID NO: 4796 - DNA, 20 bp, Sus scrofa
atcacttagttcaagctaaa

SEQ ID NO: 4797 - DNA, 20 bp, Sus scrofa
ccagtggctctactgtgctg

SEQ ID NO: 4798 - DNA, 20 bp, Sus scrofa
gaaccccagtgactcaccag

SEQ ID NO: 4799 - DNA, 20 bp, Sus scrofa
tagagccactggtgagtcac

SEQ ID NO: 4800 - DNA, 20 bp, Sus scrofa
agagccactggtgagtcact

SEQ ID NO: 4801 - DNA, 20 bp, Sus scrofa
gagccactggtgagtcactg

SEQ ID NO: 4802 - DNA, 20 bp, Sus scrofa
tggggttctctcctctgtac

SEQ ID NO: 4803 - DNA, 20 bp, Sus scrofa
tccctcccaccccagtacag

SEQ ID NO: 4804 - DNA, 20 bp, Sus scrofa
ggggttctctcctctgtact

SEQ ID NO: 4805 - DNA, 20 bp, Sus scrofa
gggttctctcctctgtactg

SEQ ID NO: 4806 - DNA, 20 bp, Sus scrofa
ttctctcctctgtactgggg

SEQ ID NO: 4807 - DNA, 20 bp, Sus scrofa
tctctcctctgtactggggt

SEQ ID NO: 4808 - DNA, 20 bp, Sus scrofa
ctcctctgtactggggtggg

SEQ ID NO: 4809 - DNA, 20 bp, Sus scrofa
tcctctgtactggggtggga

SEQ ID NO: 4810 - DNA, 20 bp, Sus scrofa
ggggtgggagggattgatgt

SEQ ID NO: 4811 - DNA, 20 bp, Sus scrofa
gggtgggagggattgatgtt

SEQ ID NO: 4812 - DNA, 20 bp, Sus scrofa
ggtgggagggattgatgttg

SEQ ID NO: 4813 - DNA, 20 bp, Sus scrofa
cagcatgttatacaaatcaa

SEQ ID NO: 4814 - DNA, 20 bp, Sus scrofa
ctttgatttgtataacatgc

SEQ ID NO: 4815 - DNA, 20 bp, Sus scrofa
tgatttgtataacatgctgg

SEQ ID NO: 4816 - DNA, 20 bp, Sus scrofa
gatttgtataacatgctggc

SEQ ID NO: 4817 - DNA, 20 bp, Sus scrofa
ttgtataacatgctggcggg

SEQ ID NO: 4818 - DNA, 20 bp, Sus scrofa
tgtataacatgctggcgggt

SEQ ID NO: 4819 - DNA, 20 bp, Sus scrofa
ataacatgctggcgggtggg

SEQ ID NO: 4820 - DNA, 20 bp, Sus scrofa
taacatgctggcgggtggga

SEQ ID NO: 4821 - DNA, 20 bp, Sus scrofa
aacatgctggcgggtgggag

SEQ ID NO: 4822 - DNA, 20 bp, Sus scrofa
tgctggcgggtgggagggga

SEQ ID NO: 4823 - DNA, 20 bp, Sus scrofa
tgtcattatatgctgtgaga

SEQ ID NO: 4824 - DNA, 20 bp, Sus scrofa
tatatgctgtgagatggagt

SEQ ID NO: 4825 - DNA, 20 bp, Sus scrofa
ttcatggacaaagcagaagt

SEQ ID NO: 4826 - DNA, 20 bp, Sus scrofa
tctaggcctcagcttcttca

SEQ ID NO: 4827 - DNA, 20 bp, Sus scrofa
ctttgtccatgaagaagctg

SEQ ID NO: 4828 - DNA, 20 bp, Sus scrofa
tcaagctctttaacgtctct

SEQ ID NO: 4829 - DNA, 20 bp, Sus scrofa
gacgttaaagagcttgacca

SEQ ID NO: 4830 - DNA, 20 bp, Sus scrofa
ctgttctgaccgtttgacct

SEQ ID NO: 4831 - DNA, 20 bp, Sus scrofa
agagcttgaccaaggtcaaa

SEQ ID NO: 4832 - DNA, 20 bp, Sus scrofa
caaggtcaaacggtcagaac

SEQ ID NO: 4833 - DNA, 20 bp, Sus scrofa
aaacggtcagaacaggcatc

SEQ ID NO: 4834 - DNA, 20 bp, Sus scrofa
aacggtcagaacaggcatca

SEQ ID NO: 4835 - DNA, 20 bp, Sus scrofa
cagaacaggcatcagggtga

SEQ ID NO: 4836 - DNA, 20 bp, Sus scrofa
aagccgagacctgggactta

SEQ ID NO: 4837 - DNA, 20 bp, Sus scrofa
gaagccgagacctgggactt

SEQ ID NO: 4838 - DNA, 20 bp, Sus scrofa
tgaaggaaaccctaagtccc

SEQ ID NO: 4839 - DNA, 20 bp, Sus scrofa
aaaccctaagtcccaggtct

SEQ ID NO: 4840 - DNA, 20 bp, Sus scrofa
tggactggaagccgagacct

SEQ ID NO: 4841 - DNA, 20 bp, Sus scrofa
ctggactggaagccgagacc

SEQ ID NO: 4842 - DNA, 20 bp, Sus scrofa
caagaggaaaagtgctggac

SEQ ID NO: 4843 - DNA, 20 bp, Sus scrofa
acgctcaagaggaaaagtgc

SEQ ID NO: 4844 - DNA, 20 bp, Sus scrofa
gctgggcagaaacgctcaag

SEQ ID NO: 4845 - DNA, 20 bp, Sus scrofa
tgagcgtttctgcccagcct

SEQ ID NO: 4846 - DNA, 20 bp, Sus scrofa
cagctcgggtttccaaggct

SEQ ID NO: 4847 - DNA, 20 bp, Sus scrofa
acagctcgggtttccaaggc

SEQ ID NO: 4848 - DNA, 20 bp, Sus scrofa
aatgacagctcgggtttcca

SEQ ID NO: 4849 - DNA, 20 bp, Sus scrofa
gcctgaagaaatgacagctc

SEQ ID NO: 4850 - DNA, 20 bp, Sus scrofa
agcctgaagaaatgacagct

SEQ ID NO: 4851 - DNA, 20 bp, Sus scrofa
acccgagctgtcatttcttc

SEQ ID NO: 4852 - DNA, 20 bp, Sus scrofa
atttcttcaggcttagagca

SEQ ID NO: 4853 - DNA, 20 bp, Sus scrofa
gcacggcttgtgcccttcac

SEQ ID NO: 4854 - DNA, 20 bp, Sus scrofa
cacggcttgtgcccttcact

SEQ ID NO: 4855 - DNA, 20 bp, Sus scrofa
gttcccccctccccagtgaa

SEQ ID NO: 4856 - DNA, 20 bp, Sus scrofa
acggcttgtgcccttcactg

SEQ ID NO: 4857 - DNA, 20 bp, Sus scrofa
ggttcccccctccccagtga

SEQ ID NO: 4858 - DNA, 20 bp, Sus scrofa
gcttgtgcccttcactgggg

SEQ ID NO: 4859 - DNA, 20 bp, Sus scrofa
cttgtgcccttcactgggga

SEQ ID NO: 4860 - DNA, 20 bp, Sus scrofa
ttgtgcccttcactggggag

SEQ ID NO: 4861 - DNA, 20 bp, Sus scrofa
tgtgcccttcactggggagg

SEQ ID NO: 4862 - DNA, 20 bp, Sus scrofa
gtgcccttcactggggaggg

SEQ ID NO: 4863 - DNA, 20 bp, Sus scrofa
tggggaggggggaaccaccc

SEQ ID NO: 4864 - DNA, 20 bp, Sus scrofa
gggtaagcttaattcctggg

SEQ ID NO: 4865 - DNA, 20 bp, Sus scrofa
ccagggtaagcttaattcct

SEQ ID NO: 4866 - DNA, 20 bp, Sus scrofa
tccagggtaagcttaattcc

SEQ ID NO: 4867 - DNA, 20 bp, Sus scrofa
cccaggaattaagcttaccc

SEQ ID NO: 4868 - DNA, 20 bp, Sus scrofa
aggaattaagcttaccctgg

SEQ ID NO: 4869 - DNA, 20 bp, Sus scrofa
aattaagcttaccctggagg

SEQ ID NO: 4870 - DNA, 20 bp, Sus scrofa
aaaacaggtcgccacctcca

SEQ ID NO: 4871 - DNA, 20 bp, Sus scrofa
gaaaacaggtcgccacctcc

SEQ ID NO: 4872 - DNA, 20 bp, Sus scrofa
tagtgacccatggagaaaac

SEQ ID NO: 4873 - DNA, 20 bp, Sus scrofa
gtggcgacctgttttctcca

SEQ ID NO: 4874 - DNA, 20 bp, Sus scrofa
tggcgacctgttttctccat

SEQ ID NO: 4875 - DNA, 20 bp, Sus scrofa
agcctctggctagtgaccca

SEQ ID NO: 4876 - DNA, 20 bp, Sus scrofa
ctccatgggtcactagccag

SEQ ID NO: 4877 - DNA, 20 bp, Sus scrofa
aatctagaggcagtagcctc

SEQ ID NO: 4878 - DNA, 20 bp, Sus scrofa
gaccacctgccacaatctag

SEQ ID NO: 4879 - DNA, 20 bp, Sus scrofa
aggctactgcctctagattg

SEQ ID NO: 4880 - DNA, 20 bp, Sus scrofa
tactgcctctagattgtggc

SEQ ID NO: 4881 - DNA, 20 bp, Sus scrofa
tgcctctagattgtggcagg

SEQ ID NO: 4882 - DNA, 20 bp, Sus scrofa
gtggcaggtggtcctgacac

SEQ ID NO: 4883 - DNA, 20 bp, Sus scrofa
tcatcccaggggcctgtgtc

SEQ ID NO: 4884 - DNA, 20 bp, Sus scrofa
gtggtcctgacacaggcccc

SEQ ID NO: 4885 - DNA, 20 bp, Sus scrofa
tggtcctgacacaggcccct

SEQ ID NO: 4886 - DNA, 20 bp, Sus scrofa
acagctctctgtcatcccag

SEQ ID NO: 4887 - DNA, 20 bp, Sus scrofa
cacagctctctgtcatccca

SEQ ID NO: 4888 - DNA, 20 bp, Sus scrofa
acacagctctctgtcatccc

SEQ ID NO: 4889 - DNA, 20 bp, Sus scrofa
tgggatgacagagagctgtg

SEQ ID NO: 4890 - DNA, 20 bp, Sus scrofa
tgacagagagctgtgtggca

SEQ ID NO: 4891 - DNA, 20 bp, Sus scrofa
gacagagagctgtgtggcat

SEQ ID NO: 4892 - DNA, 20 bp, Sus scrofa
gtggcatgggagtcccatgt

SEQ ID NO: 4893 - DNA, 20 bp, Sus scrofa
tcacagaggaaagcctacat

SEQ ID NO: 4894 - DNA, 20 bp, Sus scrofa
ctcacagaggaaagcctaca

SEQ ID NO: 4895 - DNA, 20 bp, Sus scrofa
actctgctctgtgctcacag

SEQ ID NO: 4896 - DNA, 20 bp, Sus scrofa
tctgtgagcacagagcagag

SEQ ID NO: 4897 - DNA, 20 bp, Sus scrofa
agcacagagcagagtggctc

SEQ ID NO: 4898 - DNA, 20 bp, Sus scrofa
gcacagagcagagtggctcc

SEQ ID NO: 4899 - DNA, 20 bp, Sus scrofa
cacactcaggactgatgacc

SEQ ID NO: 4900 - DNA, 20 bp, Sus scrofa
ccctggtcaccatcacactc

SEQ ID NO: 4901 - DNA, 20 bp, Sus scrofa
gtcatcagtcctgagtgtga

SEQ ID NO: 4902 - DNA, 20 bp, Sus scrofa
tcctgagtgtgatggtgacc

SEQ ID NO: 4903 - DNA, 20 bp, Sus scrofa
cctgagtgtgatggtgacca

SEQ ID NO: 4904 - DNA, 20 bp, Sus scrofa
cgcccagggctctgaggccc

SEQ ID NO: 4905 - DNA, 20 bp, Sus scrofa
agaaaccgcccagggctctg

SEQ ID NO: 4906 - DNA, 20 bp, Sus scrofa
tgaccagggcctcagagccc

SEQ ID NO: 4907 - DNA, 20 bp, Sus scrofa
gaccagggcctcagagccct

SEQ ID NO: 4908 - DNA, 20 bp, Sus scrofa
cagggcctcagagccctggg

SEQ ID NO: 4909 - DNA, 20 bp, Sus scrofa
gcagaagaagaaaccgccca

SEQ ID NO: 4910 - DNA, 20 bp, Sus scrofa
agcagaagaagaaaccgccc

SEQ ID NO: 4911 - DNA, 20 bp, Sus scrofa
ctagtgaatcataaagttta

SEQ ID NO: 4912 - DNA, 20 bp, Sus scrofa
gctagtgaatcataaagttt

SEQ ID NO: 4913 - DNA, 20 bp, Sus scrofa
ttatgattcactagccagaa

SEQ ID NO: 4914 - DNA, 20 bp, Sus scrofa
tatgattcactagccagaaa

SEQ ID NO: 4915 - DNA, 20 bp, Sus scrofa
atgattcactagccagaaag

SEQ ID NO: 4916 - DNA, 20 bp, Sus scrofa
gaccatgacctacccctttc

SEQ ID NO: 4917 - DNA, 20 bp, Sus scrofa
ttcactagccagaaaggggt

SEQ ID NO: 4918 - DNA, 20 bp, Sus scrofa
agccagaaaggggtaggtca

SEQ ID NO: 4919 - DNA, 20 bp, Sus scrofa
tagcaatttctccattatcc

SEQ ID NO: 4920 - DNA, 20 bp, Sus scrofa
attcactcagaccaggataa

SEQ ID NO: 4921 - DNA, 20 bp, Sus scrofa
agaatacattcactcagacc

SEQ ID NO: 4922 - DNA, 20 bp, Sus scrofa
aatgtattcttttgagttca

SEQ ID NO: 4923 - DNA, 20 bp, Sus scrofa
gttcaaggaaatcaactgta

SEQ ID NO: 4924 - DNA, 20 bp, Sus scrofa
ttccctgattctaaggtgca

SEQ ID NO: 4925 - DNA, 20 bp, Sus scrofa
atggcctttccctgattcta

SEQ ID NO: 4926 - DNA, 20 bp, Sus scrofa
aagccatgcaccttagaatc

SEQ ID NO: 4927 - DNA, 20 bp, Sus scrofa
agccatgcaccttagaatca

SEQ ID NO: 4928 - DNA, 20 bp, Sus scrofa
tgcaccttagaatcagggaa

SEQ ID NO: 4929 - DNA, 20 bp, Sus scrofa
agaatcagggaaaggccatg

SEQ ID NO: 4930 - DNA, 20 bp, Sus scrofa
aacttggccaaatatcctca

SEQ ID NO: 4931 - DNA, 20 bp, Sus scrofa
ggaaaggccatgaggatatt

SEQ ID NO: 4932 - DNA, 20 bp, Sus scrofa
atgaggatatttggccaagt

SEQ ID NO: 4933 - DNA, 20 bp, Sus scrofa
aaagaaaaacatggccaact

SEQ ID NO: 4934 - DNA, 20 bp, Sus scrofa
ctacccagaaaagaaaaaca

SEQ ID NO: 4935 - DNA, 20 bp, Sus scrofa
ttggccatgtttttcttttc

SEQ ID NO: 4936 - DNA, 20 bp, Sus scrofa
tggccatgtttttcttttct

SEQ ID NO: 4937 - DNA, 20 bp, Sus scrofa
tttttcttttctgggtagat

SEQ ID NO: 4938 - DNA, 20 bp, Sus scrofa
ttttcttttctgggtagata

SEQ ID NO: 4939 - DNA, 20 bp, Sus scrofa
tcttttctgggtagataggg

SEQ ID NO: 4940 - DNA, 20 bp, Sus scrofa
tgggtagatagggtggcagt

SEQ ID NO: 4941 - DNA, 20 bp, Sus scrofa
gggtagatagggtggcagtt

SEQ ID NO: 4942 - DNA, 20 bp, Sus scrofa
ggtagatagggtggcagttg

SEQ ID NO: 4943 - DNA, 20 bp, Sus scrofa
tggcagttggggcatctctc

SEQ ID NO: 4944 - DNA, 20 bp, Sus scrofa
ggcagttggggcatctctca

SEQ ID NO: 4945 - DNA, 20 bp, Sus scrofa
ctgagcttctgtggagggca

SEQ ID NO: 4946 - DNA, 20 bp, Sus scrofa
gaaccctgagcttctgtgga

SEQ ID NO: 4947 - DNA, 20 bp, Sus scrofa
tgaaccctgagcttctgtgg

SEQ ID NO: 4948 - DNA, 20 bp, Sus scrofa
acctgaaccctgagcttctg

SEQ ID NO: 4949 - DNA, 20 bp, Sus scrofa
cttgccctccacagaagctc

SEQ ID NO: 4950 - DNA, 20 bp, Sus scrofa
ttgccctccacagaagctca

SEQ ID NO: 4951 - DNA, 20 bp, Sus scrofa
tccacagaagctcagggttc

SEQ ID NO: 4952 - DNA, 20 bp, Sus scrofa
aagctcagggttcaggttca

SEQ ID NO: 4953 - DNA, 20 bp, Sus scrofa
agctcagggttcaggttcat

SEQ ID NO: 4954 - DNA, 20 bp, Sus scrofa
ttcaggttcatgggccagca

SEQ ID NO: 4955 - DNA, 20 bp, Sus scrofa
tgcttccggttctgccatgc

SEQ ID NO: 4956 - DNA, 20 bp, Sus scrofa
atgggccagcatggcagaac

SEQ ID NO: 4957 - DNA, 20 bp, Sus scrofa
ggaagagaaatgtctgcttc

SEQ ID NO: 4958 - DNA, 20 bp, Sus scrofa
gggcaggtaaagtctgagtt

SEQ ID NO: 4959 - DNA, 20 bp, Sus scrofa
actgagacctggtcaagggc

SEQ ID NO: 4960 - DNA, 20 bp, Sus scrofa
gactttacctgcccttgacc

SEQ ID NO: 4961 - DNA, 20 bp, Sus scrofa
tgtgactgagacctggtcaa

SEQ ID NO: 4962 - DNA, 20 bp, Sus scrofa
ctgtgactgagacctggtca

SEQ ID NO: 4963 - DNA, 20 bp, Sus scrofa
aagagtctgtgactgagacc

SEQ ID NO: 4964 - DNA, 20 bp, Sus scrofa
tatggtcagtgtcaggaact

SEQ ID NO: 4965 - DNA, 20 bp, Sus scrofa
tgtctcttatggtcagtgtc

SEQ ID NO: 4966 - DNA, 20 bp, Sus scrofa
attaaagttactgtctctta

SEQ ID NO: 4967 - DNA, 20 bp, Sus scrofa
agtaactttaatcaccagtc

SEQ ID NO: 4968 - DNA, 20 bp, Sus scrofa
ccaacggggccaggcctgac

SEQ ID NO: 4969 - DNA, 20 bp, Sus scrofa
ctttaatcaccagtcaggcc

SEQ ID NO: 4970 - DNA, 20 bp, Sus scrofa
gtccctgttccaacggggcc

SEQ ID NO: 4971 - DNA, 20 bp, Sus scrofa
ccagtcaggcctggccccgt

SEQ ID NO: 4972 - DNA, 20 bp, Sus scrofa
gccaagtccctgttccaacg

SEQ ID NO: 4973 - DNA, 20 bp, Sus scrofa
ggccaagtccctgttccaac

SEQ ID NO: 4974 - DNA, 20 bp, Sus scrofa
aggccaagtccctgttccaa

SEQ ID NO: 4975 - DNA, 20 bp, Sus scrofa
aggcctggccccgttggaac

SEQ ID NO: 4976 - DNA, 20 bp, Sus scrofa
ggcctggccccgttggaaca

SEQ ID NO: 4977 - DNA, 20 bp, Sus scrofa
gccccgttggaacagggact

SEQ ID NO: 4978 - DNA, 20 bp, Sus scrofa
gttggaacagggacttggcc

SEQ ID NO: 4979 - DNA, 20 bp, Sus scrofa
ttggaacagggacttggcct

SEQ ID NO: 4980 - DNA, 20 bp, Sus scrofa
tggaacagggacttggcctg

SEQ ID NO: 4981 - DNA, 20 bp, Sus scrofa
acagggacttggcctggggc

SEQ ID NO: 4982 - DNA, 20 bp, Sus scrofa
cagggacttggcctggggca

SEQ ID NO: 4983 - DNA, 20 bp, Sus scrofa
agacacaggtaccctgcccc

SEQ ID NO: 4984 - DNA, 20 bp, Sus scrofa
cttgattcccctcaagacac

SEQ ID NO: 4985 - DNA, 20 bp, Sus scrofa
ggcagggtacctgtgtcttg

SEQ ID NO: 4986 - DNA, 20 bp, Sus scrofa
gcagggtacctgtgtcttga

SEQ ID NO: 4987 - DNA, 20 bp, Sus scrofa
cagggtacctgtgtcttgag

SEQ ID NO: 4988 - DNA, 20 bp, Sus scrofa
aaagggtcacacagctaaca

SEQ ID NO: 4989 - DNA, 20 bp, Sus scrofa
ctgaggcctaggaagtgaaa

SEQ ID NO: 4990 - DNA, 20 bp, Sus scrofa
tctgaggcctaggaagtgaa

SEQ ID NO: 4991 - DNA, 20 bp, Sus scrofa
gtgtgaccctttcacttcct

SEQ ID NO: 4992 - DNA, 20 bp, Sus scrofa
gtggctggaatctgaggcct

SEQ ID NO: 4993 - DNA, 20 bp, Sus scrofa
tgtttggtggctggaatctg

SEQ ID NO: 4994 - DNA, 20 bp, Sus scrofa
ccttacacctgtttggtggc

SEQ ID NO: 4995 - DNA, 20 bp, Sus scrofa
tcagattccagccaccaaac

SEQ ID NO: 4996 - DNA, 20 bp, Sus scrofa
tacaccttacacctgtttgg

SEQ ID NO: 4997 - DNA, 20 bp, Sus scrofa
tactacaccttacacctgtt

SEQ ID NO: 4998 - DNA, 20 bp, Sus scrofa
ccagccaccaaacaggtgta

SEQ ID NO: 4999 - DNA, 20 bp, Sus scrofa
aacaggtgtaaggtgtagta

SEQ ID NO: 5000 - DNA, 20 bp, Sus scrofa
acaggtgtaaggtgtagtat

SEQ ID NO: 5001 - DNA, 20 bp, Sus scrofa
tagtatgggctgaaactaat

SEQ ID NO: 5002 - DNA, 20 bp, Sus scrofa
cgactttcaaaaaggacaag

SEQ ID NO: 5003 - DNA, 20 bp, Sus scrofa
tccaacaccgactttcaaaa

SEQ ID NO: 5004 - DNA, 20 bp, Sus scrofa
ctcttgtcctttttgaaagt

SEQ ID NO: 5005 - DNA, 20 bp, Sus scrofa
tcctttttgaaagtcggtgt

SEQ ID NO: 5006 - DNA, 20 bp, Sus scrofa
tgttggaagagtaaaagcac

SEQ ID NO: 5007 - DNA, 20 bp, Sus scrofa
agagtaaaagcacaggtctg

SEQ ID NO: 5008 - DNA, 20 bp, Sus scrofa
taaaagcacaggtctgaggt

SEQ ID NO: 5009 - DNA, 20 bp, Sus scrofa
aaaagcacaggtctgaggtt

SEQ ID NO: 5010 - DNA, 20 bp, Sus scrofa
cagagaattgggattggatc

SEQ ID NO: 5011 - DNA, 20 bp, Sus scrofa
agagagcagagaattgggat

SEQ ID NO: 5012 - DNA, 20 bp, Sus scrofa
gaagaagagagcagagaatt

SEQ ID NO: 5013 - DNA, 20 bp, Sus scrofa
ggaagaagagagcagagaat

SEQ ID NO: 5014 - DNA, 20 bp, Sus scrofa
atcagttcatgttatagatg

SEQ ID NO: 5015 - DNA, 20 bp, Sus scrofa
gataattatttctgccttat

SEQ ID NO: 5016 - DNA, 20 bp, Sus scrofa
ataattatttctgccttatt

SEQ ID NO: 5017 - DNA, 20 bp, Sus scrofa
taattatttctgccttattg

SEQ ID NO: 5018 - DNA, 20 bp, Sus scrofa
ttatccttatagccccaata

SEQ ID NO: 5019 - DNA, 20 bp, Sus scrofa
tctgccttattggggctata

SEQ ID NO: 5020 - DNA, 20 bp, Sus scrofa
tctgtgaataaaagtaataa

SEQ ID NO: 5021 - DNA, 20 bp, Sus scrofa
ttattacttttattcacaga

SEQ ID NO: 5022 - DNA, 20 bp, Sus scrofa
aggggaactgagaagggcac

SEQ ID NO: 5023 - DNA, 20 bp, Sus scrofa
tgccagaggggaactgagaa

SEQ ID NO: 5024 - DNA, 20 bp, Sus scrofa
gtgccagaggggaactgaga

SEQ ID NO: 5025 - DNA, 20 bp, Sus scrofa
tgcccttctcagttcccctc

SEQ ID NO: 5026 - DNA, 20 bp, Sus scrofa
ctgtgactaaggtgccagag

SEQ ID NO: 5027 - DNA, 20 bp, Sus scrofa
cctgtgactaaggtgccaga

SEQ ID NO: 5028 - DNA, 20 bp, Sus scrofa
tcctgtgactaaggtgccag

SEQ ID NO: 5029 - DNA, 20 bp, Sus scrofa
gctgcctgctcctgtgacta

SEQ ID NO: 5030 - DNA, 20 bp, Sus scrofa
ccctctggcaccttagtcac

SEQ ID NO: 5031 - DNA, 20 bp, Sus scrofa
ggcaccttagtcacaggagc

SEQ ID NO: 5032 - DNA, 20 bp, Sus scrofa
ggagcaggcagcaaagcttt

SEQ ID NO: 5033 - DNA, 20 bp, Sus scrofa
tgaaataaaccgggctctct

SEQ ID NO: 5034 - DNA, 20 bp, Sus scrofa
cttttggcaccaagagagcc

SEQ ID NO: 5035 - DNA, 20 bp, Sus scrofa
tggcgggcttgaaataaacc

SEQ ID NO: 5036 - DNA, 20 bp, Sus scrofa
gtggcgggcttgaaataaac

SEQ ID NO: 5037 - DNA, 20 bp, Sus scrofa
gcttttgccgtaacagtggc

SEQ ID NO: 5038 - DNA, 20 bp, Sus scrofa
agcttttgccgtaacagtgg

SEQ ID NO: 5039 - DNA, 20 bp, Sus scrofa
tttcaagcccgccactgtta

SEQ ID NO: 5040 - DNA, 20 bp, Sus scrofa
gacagcttttgccgtaacag

SEQ ID NO: 5041 - DNA, 20 bp, Sus scrofa
caagacctcgttcttttgtt

SEQ ID NO: 5042 - DNA, 20 bp, Sus scrofa
cattgccaaacaaaagaacg

SEQ ID NO: 5043 - DNA, 20 bp, Sus scrofa
aagatggggggttggactta

SEQ ID NO: 5044 - DNA, 20 bp, Sus scrofa
ttatctggaagatggggggt

SEQ ID NO: 5045 - DNA, 20 bp, Sus scrofa
ttccttatctggaagatggg

SEQ ID NO: 5046 - DNA, 20 bp, Sus scrofa
gttccttatctggaagatgg

SEQ ID NO: 5047 - DNA, 20 bp, Sus scrofa
tgttccttatctggaagatg

SEQ ID NO: 5048 - DNA, 20 bp, Sus scrofa
atgttccttatctggaagat

SEQ ID NO: 5049 - DNA, 20 bp, Sus scrofa
catgttccttatctggaaga

SEQ ID NO: 5050 - DNA, 20 bp, Sus scrofa
aaccccccatcttccagata

SEQ ID NO: 5051 - DNA, 20 bp, Sus scrofa
gggggttcatgttccttatc

SEQ ID NO: 5052 - DNA, 20 bp, Sus scrofa
ggtttgcggcggaggggggg

SEQ ID NO: 5053 - DNA, 20 bp, Sus scrofa
tggtttgcggcggagggggg

SEQ ID NO: 5054 - DNA, 20 bp, Sus scrofa
ctggtttgcggcggaggggg

SEQ ID NO: 5055 - DNA, 20 bp, Sus scrofa
cctggtttgcggcggagggg

SEQ ID NO: 5056 - DNA, 20 bp, Sus scrofa
ccctggtttgcggcggaggg

SEQ ID NO: 5057 - DNA, 20 bp, Sus scrofa
cccctggtttgcggcggagg

SEQ ID NO: 5058 - DNA, 20 bp, Sus scrofa
acccctggtttgcggcggag

SEQ ID NO: 5059 - DNA, 20 bp, Sus scrofa
gacccctggtttgcggcgga

SEQ ID NO: 5060 - DNA, 20 bp, Sus scrofa
agacccctggtttgcggcgg

SEQ ID NO: 5061 - DNA, 20 bp, Sus scrofa
atgagacccctggtttgcgg

SEQ ID NO: 5062 - DNA, 20 bp, Sus scrofa
ccccccctccgccgcaaacc

SEQ ID NO: 5063 - DNA, 20 bp, Sus scrofa
gccatgagacccctggtttg

SEQ ID NO: 5064 - DNA, 20 bp, Sus scrofa
cccccctccgccgcaaacca

SEQ ID NO: 5065 - DNA, 20 bp, Sus scrofa
ccccctccgccgcaaaccag

SEQ ID NO: 5066 - DNA, 20 bp, Sus scrofa
ttgctcagccatgagacccc

SEQ ID NO: 5067 - DNA, 20 bp, Sus scrofa
gccgcaaaccaggggtctca

SEQ ID NO: 5068 - DNA, 20 bp, Sus scrofa
cgcaggtgacaagcaaactc

SEQ ID NO: 5069 - DNA, 20 bp, Sus scrofa
cagagtttgcttgtcacctg

SEQ ID NO: 5070 - DNA, 20 bp, Sus scrofa
agagtttgcttgtcacctgc

SEQ ID NO: 5071 - DNA, 20 bp, Sus scrofa
gtttgcttgtcacctgcggg

SEQ ID NO: 5072 - DNA, 20 bp, Sus scrofa
tttgcttgtcacctgcgggc

SEQ ID NO: 5073 - DNA, 20 bp, Sus scrofa
gtgcagagcttcccgcccgc

SEQ ID NO: 5074 - DNA, 20 bp, Sus scrofa
tcagttgggggtgacacgag

SEQ ID NO: 5075 - DNA, 20 bp, Sus scrofa
gtggcagggggatcagttgg

SEQ ID NO: 5076 - DNA, 20 bp, Sus scrofa
agtggcagggggatcagttg

SEQ ID NO: 5077 - DNA, 20 bp, Sus scrofa
cagtggcagggggatcagtt

SEQ ID NO: 5078 - DNA, 20 bp, Sus scrofa
acagtggcagggggatcagt

SEQ ID NO: 5079 - DNA, 20 bp, Sus scrofa
acagagtggacagtggcagg

SEQ ID NO: 5080 - DNA, 20 bp, Sus scrofa
aacagagtggacagtggcag

SEQ ID NO: 5081 - DNA, 20 bp, Sus scrofa
aaacagagtggacagtggca

SEQ ID NO: 5082 - DNA, 20 bp, Sus scrofa
caaacagagtggacagtggc

SEQ ID NO: 5083 - DNA, 20 bp, Sus scrofa
caagcaaacagagtggacag

SEQ ID NO: 5084 - DNA, 20 bp, Sus scrofa
ttttctgcaagcaaacagag

SEQ ID NO: 5085 - DNA, 20 bp, Sus scrofa
tgaaaaggtctaagctcttg

SEQ ID NO: 5086 - DNA, 20 bp, Sus scrofa
tggtcacctcgcaattgaaa

SEQ ID NO: 5087 - DNA, 20 bp, Sus scrofa
cttagaccttttcaattgcg

SEQ ID NO: 5088 - DNA, 20 bp, Sus scrofa
ttctcggtagtcattcaggt

SEQ ID NO: 5089 - DNA, 20 bp, Sus scrofa
cgttttctcggtagtcattc

SEQ ID NO: 5090 - DNA, 20 bp, Sus scrofa
ggagcttgaacacgttttct

SEQ ID NO: 5091 - DNA, 20 bp, Sus scrofa
cgagatacgtgagctgtgga

SEQ ID NO: 5092 - DNA, 20 bp, Sus scrofa
ccatcgagatacgtgagctg

SEQ ID NO: 5093 - DNA, 20 bp, Sus scrofa
ccacagctcacgtatctcga

SEQ ID NO: 5094 - DNA, 20 bp, Sus scrofa
cgtatctcgatggctacgac

SEQ ID NO: 5095 - DNA, 20 bp, Sus scrofa
gtatctcgatggctacgacc

SEQ ID NO: 5096 - DNA, 20 bp, Sus scrofa
cagaggcctccttgtcgtcc

SEQ ID NO: 5097 - DNA, 20 bp, Sus scrofa
tggctacgaccgggacgaca

SEQ ID NO: 5098 - DNA, 20 bp, Sus scrofa
ctacgaccgggacgacaagg

SEQ ID NO: 5099 - DNA, 20 bp, Sus scrofa
gccctcagcgtctgagtcag

SEQ ID NO: 5100 - DNA, 20 bp, Sus scrofa
ggcctctgactcagacgctg

SEQ ID NO: 5101 - DNA, 20 bp, Sus scrofa
gcctctgactcagacgctga

SEQ ID NO: 5102 - DNA, 20 bp, Sus scrofa
ctcagacgctgagggctacg

SEQ ID NO: 5103 - DNA, 20 bp, Sus scrofa
agacgctgagggctacgtgg

SEQ ID NO: 5104 - DNA, 20 bp, Sus scrofa
gacgctgagggctacgtgga

SEQ ID NO: 5105 - DNA, 20 bp, Sus scrofa
tgagggctacgtggagggcc

SEQ ID NO: 5106 - DNA, 20 bp, Sus scrofa
catcctcctcgtcgtcgtcc

SEQ ID NO: 5107 - DNA, 20 bp, Sus scrofa
ggagggcctggacgacgacg

SEQ ID NO: 5108 - DNA, 20 bp, Sus scrofa
gggcctggacgacgacgagg

SEQ ID NO: 5109 - DNA, 20 bp, Sus scrofa
ggacgacgacgaggaggatg

SEQ ID NO: 5110 - DNA, 20 bp, Sus scrofa
gccgctcggctcggcagccg

SEQ ID NO: 5111 - DNA, 20 bp, Sus scrofa
ccgcgcggcgccgctcggct

SEQ ID NO: 5112 - DNA, 20 bp, Sus scrofa
accgcggctgccgagccgag

SEQ ID NO: 5113 - DNA, 20 bp, Sus scrofa
cggccccgcgcggcgccgct

SEQ ID NO: 5114 - DNA, 20 bp, Sus scrofa
ccgagccgagcggcgccgcg

SEQ ID NO: 5115 - DNA, 20 bp, Sus scrofa
cgagccgagcggcgccgcgc

SEQ ID NO: 5116 - DNA, 20 bp, Sus scrofa
gagccgagcggcgccgcgcg

SEQ ID NO: 5117 - DNA, 20 bp, Sus scrofa
cggctcgactcggccccgcg

SEQ ID NO: 5118 - DNA, 20 bp, Sus scrofa
ggtggctgctcggctcgact

SEQ ID NO: 5119 - DNA, 20 bp, Sus scrofa
acgcggcgcgggtggctgct

SEQ ID NO: 5120 - DNA, 20 bp, Sus scrofa
aaccggcgacgcggcgcggg

SEQ ID NO: 5121 - DNA, 20 bp, Sus scrofa
ttaaaccggcgacgcggcgc

SEQ ID NO: 5122 - DNA, 20 bp, Sus scrofa
cttaaaccggcgacgcggcg

SEQ ID NO: 5123 - DNA, 20 bp, Sus scrofa
agccacccgcgccgcgtcgc

SEQ ID NO: 5124 - DNA, 20 bp, Sus scrofa
ctgcgcttaaaccggcgacg

SEQ ID NO: 5125 - DNA, 20 bp, Sus scrofa
gctccgcactgcgcttaaac

SEQ ID NO: 5126 - DNA, 20 bp, Sus scrofa
tcgccggtttaagcgcagtg

SEQ ID NO: 5127 - DNA, 20 bp, Sus scrofa
ttaagcgcagtgcggagccg

SEQ ID NO: 5128 - DNA, 20 bp, Sus scrofa
gcgcagtgcggagccgcggc

SEQ ID NO: 5129 - DNA, 20 bp, Sus scrofa
cgcagtgcggagccgcggcc

SEQ ID NO: 5130 - DNA, 20 bp, Sus scrofa
gcagtgcggagccgcggccg

SEQ ID NO: 5131 - DNA, 20 bp, Sus scrofa
actaccgccgcccccggccg

SEQ ID NO: 5132 - DNA, 20 bp, Sus scrofa
cagtgcggagccgcggccgg

SEQ ID NO: 5133 - DNA, 20 bp, Sus scrofa
tgcggagccgcggccggggg

SEQ ID NO: 5134 - DNA, 20 bp, Sus scrofa
ggtctcactaccgccgcccc

SEQ ID NO: 5135 - DNA, 20 bp, Sus scrofa
ggagccgcggccgggggcgg

SEQ ID NO: 5136 - DNA, 20 bp, Sus scrofa
agggggctggagcgcagcgc

SEQ ID NO: 5137 - DNA, 20 bp, Sus scrofa
ccatggagggaaaagggggc

SEQ ID NO: 5138 - DNA, 20 bp, Sus scrofa
gaaaccatggagggaaaagg

SEQ ID NO: 5139 - DNA, 20 bp, Sus scrofa
agaaaccatggagggaaaag

SEQ ID NO: 5140 - DNA, 20 bp, Sus scrofa
gagaaaccatggagggaaaa

SEQ ID NO: 5141 - DNA, 20 bp, Sus scrofa
agagaaaccatggagggaaa

SEQ ID NO: 5142 - DNA, 20 bp, Sus scrofa
ccagcccccttttccctcca

SEQ ID NO: 5143 - DNA, 20 bp, Sus scrofa
gagcggagagaaaccatgga

SEQ ID NO: 5144 - DNA, 20 bp, Sus scrofa
ggagcggagagaaaccatgg

SEQ ID NO: 5145 - DNA, 20 bp, Sus scrofa
acgggagcggagagaaacca

SEQ ID NO: 5146 - DNA, 20 bp, Sus scrofa
agccaagttactcacgggag

SEQ ID NO: 5147 - DNA, 20 bp, Sus scrofa
cccggagccaagttactcac

SEQ ID NO: 5148 - DNA, 20 bp, Sus scrofa
ccccggagccaagttactca

SEQ ID NO: 5149 - DNA, 20 bp, Sus scrofa
ctccgctcccgtgagtaact

SEQ ID NO: 5150 - DNA, 20 bp, Sus scrofa
tcccgtgagtaacttggctc

SEQ ID NO: 5151 - DNA, 20 bp, Sus scrofa
cccgtgagtaacttggctcc

SEQ ID NO: 5152 - DNA, 20 bp, Sus scrofa
ccgtgagtaacttggctccg

SEQ ID NO: 5153 - DNA, 20 bp, Sus scrofa
cgtgagtaacttggctccgg

SEQ ID NO: 5154 - DNA, 20 bp, Sus scrofa
gggcaggagagcggagcccc

SEQ ID NO: 5155 - DNA, 20 bp, Sus scrofa
gcggcgtgcgggcaggagag

SEQ ID NO: 5156 - DNA, 20 bp, Sus scrofa
gcggctggcggcgtgcgggc

SEQ ID NO: 5157 - DNA, 20 bp, Sus scrofa
cggggcggctggcggcgtgc

SEQ ID NO: 5158 - DNA, 20 bp, Sus scrofa
ccggggcggctggcggcgtg

SEQ ID NO: 5159 - DNA, 20 bp, Sus scrofa
gcgcggtccggggcggctgg

SEQ ID NO: 5160 - DNA, 20 bp, Sus scrofa
gcggcgcggtccggggcggc

SEQ ID NO: 5161 - DNA, 20 bp, Sus scrofa
ccgcacgccgccagccgccc

SEQ ID NO: 5162 - DNA, 20 bp, Sus scrofa
gccggcggcgcggtccgggg

SEQ ID NO: 5163 - DNA, 20 bp, Sus scrofa
gaggccggcggcgcggtccg

SEQ ID NO: 5164 - DNA, 20 bp, Sus scrofa
agaggccggcggcgcggtcc

SEQ ID NO: 5165 - DNA, 20 bp, Sus scrofa
cagaggccggcggcgcggtc

SEQ ID NO: 5166 - DNA, 20 bp, Sus scrofa
gccgccccggaccgcgccgc

SEQ ID NO: 5167 - DNA, 20 bp, Sus scrofa
cgaggcagaggccggcggcg

SEQ ID NO: 5168 - DNA, 20 bp, Sus scrofa
ctgctcgaggcagaggccgg

SEQ ID NO: 5169 - DNA, 20 bp, Sus scrofa
ggtctgctcgaggcagaggc

SEQ ID NO: 5170 - DNA, 20 bp, Sus scrofa
aaggggtctgctcgaggcag

SEQ ID NO: 5171 - DNA, 20 bp, Sus scrofa
cgtcggaaggggtctgctcg

SEQ ID NO: 5172 - DNA, 20 bp, Sus scrofa
gcagcgagggccgtcggaag

SEQ ID NO: 5173 - DNA, 20 bp, Sus scrofa
ctcgagcagaccccttccga

SEQ ID NO: 5174 - DNA, 20 bp, Sus scrofa
cgcagcgagggccgtcggaa

SEQ ID NO: 5175 - DNA, 20 bp, Sus scrofa
gcgcagcgagggccgtcgga

SEQ ID NO: 5176 - DNA, 20 bp, Sus scrofa
gcctgcgcagcgagggccgt

SEQ ID NO: 5177 - DNA, 20 bp, Sus scrofa
gctcccagcctgcgcagcga

SEQ ID NO: 5178 - DNA, 20 bp, Sus scrofa
ggctcccagcctgcgcagcg

SEQ ID NO: 5179 - DNA, 20 bp, Sus scrofa
tccgacggccctcgctgcgc

SEQ ID NO: 5180 - DNA, 20 bp, Sus scrofa
acggccctcgctgcgcaggc

SEQ ID NO: 5181 - DNA, 20 bp, Sus scrofa
cggccctcgctgcgcaggct

SEQ ID NO: 5182 - DNA, 20 bp, Sus scrofa
aacgggggcggaggggggag

SEQ ID NO: 5183 - DNA, 20 bp, Sus scrofa
tccgcaacgggggcggaggg

SEQ ID NO: 5184 - DNA, 20 bp, Sus scrofa
ttccgcaacgggggcggagg

SEQ ID NO: 5185 - DNA, 20 bp, Sus scrofa
tttccgcaacgggggcggag

SEQ ID NO: 5186 - DNA, 20 bp, Sus scrofa
ctttccgcaacgggggcgga

SEQ ID NO: 5187 - DNA, 20 bp, Sus scrofa
actttccgcaacgggggcgg

SEQ ID NO: 5188 - DNA, 20 bp, Sus scrofa
ttaactttccgcaacggggg

SEQ ID NO: 5189 - DNA, 20 bp, Sus scrofa
tcccccctccgcccccgttg

SEQ ID NO: 5190 - DNA, 20 bp, Sus scrofa
aacttaactttccgcaacgg

SEQ ID NO: 5191 - DNA, 20 bp, Sus scrofa
aaacttaactttccgcaacg

SEQ ID NO: 5192 - DNA, 20 bp, Sus scrofa
caaacttaactttccgcaac

SEQ ID NO: 5193 - DNA, 20 bp, Sus scrofa
tcaaacttaactttccgcaa

SEQ ID NO: 5194 - DNA, 20 bp, Sus scrofa
gcggaaagttaagtttgaag

SEQ ID NO: 5195 - DNA, 20 bp, Sus scrofa
cggaaagttaagtttgaaga

SEQ ID NO: 5196 - DNA, 20 bp, Sus scrofa
ggaaagttaagtttgaagag

SEQ ID NO: 5197 - DNA, 20 bp, Sus scrofa
gaaagttaagtttgaagagg

SEQ ID NO: 5198 - DNA, 20 bp, Sus scrofa
aaagttaagtttgaagaggg

SEQ ID NO: 5199 - DNA, 20 bp, Sus scrofa
aagtttgaagaggggggaag

SEQ ID NO: 5200 - DNA, 20 bp, Sus scrofa
agtttgaagaggggggaaga

SEQ ID NO: 5201 - DNA, 20 bp, Sus scrofa
gaggggggaagagggaaaca

SEQ ID NO: 5202 - DNA, 20 bp, Sus scrofa
catgaagaagagaatccacc

SEQ ID NO: 5203 - DNA, 20 bp, Sus scrofa
tccggttcctcagctccagg

SEQ ID NO: 5204 - DNA, 20 bp, Sus scrofa
gggtccggttcctcagctcc

SEQ ID NO: 5205 - DNA, 20 bp, Sus scrofa
agagaatccacctggagctg

SEQ ID NO: 5206 - DNA, 20 bp, Sus scrofa
tccacctggagctgaggaac

SEQ ID NO: 5207 - DNA, 20 bp, Sus scrofa
ggagctgaggaaccggaccc

SEQ ID NO: 5208 - DNA, 20 bp, Sus scrofa
tgcttacagctgccggggtc

SEQ ID NO: 5209 - DNA, 20 bp, Sus scrofa
gattctgcttacagctgccg

SEQ ID NO: 5210 - DNA, 20 bp, Sus scrofa
ggattctgcttacagctgcc

SEQ ID NO: 5211 - DNA, 20 bp, Sus scrofa
gggattctgcttacagctgc

SEQ ID NO: 5212 - DNA, 20 bp, Sus scrofa
gctgtaagcagaatcccctt

SEQ ID NO: 5213 - DNA, 20 bp, Sus scrofa
ctgtaagcagaatccccttc

SEQ ID NO: 5214 - DNA, 20 bp, Sus scrofa
gggggagagggagcccgaag

SEQ ID NO: 5215 - DNA, 20 bp, Sus scrofa
ggggggagagggagcccgaa

SEQ ID NO: 5216 - DNA, 20 bp, Sus scrofa
cggggggagagggagcccga

SEQ ID NO: 5217 - DNA, 20 bp, Sus scrofa
tgcaagtcatcggggggaga

SEQ ID NO: 5218 - DNA, 20 bp, Sus scrofa
atgcaagtcatcggggggag

SEQ ID NO: 5219 - DNA, 20 bp, Sus scrofa
attacatgcaagtcatcggg

SEQ ID NO: 5220 - DNA, 20 bp, Sus scrofa
cattacatgcaagtcatcgg

SEQ ID NO: 5221 - DNA, 20 bp, Sus scrofa
ccattacatgcaagtcatcg

SEQ ID NO: 5222 - DNA, 20 bp, Sus scrofa
accattacatgcaagtcatc

SEQ ID NO: 5223 - DNA, 20 bp, Sus scrofa
caccattacatgcaagtcat

SEQ ID NO: 5224 - DNA, 20 bp, Sus scrofa
ccccgatgacttgcatgtaa

SEQ ID NO: 5225 - DNA, 20 bp, Sus scrofa
cgatgacttgcatgtaatgg

SEQ ID NO: 5226 - DNA, 20 bp, Sus scrofa
catgtaatggtggccacctg

SEQ ID NO: 5227 - DNA, 20 bp, Sus scrofa
atgtaatggtggccacctgc

SEQ ID NO: 5228 - DNA, 20 bp, Sus scrofa
tgtaatggtggccacctgcg

SEQ ID NO: 5229 - DNA, 20 bp, Sus scrofa
cgcgtctgggaccccgcagg

SEQ ID NO: 5230 - DNA, 20 bp, Sus scrofa
gcccgcgtctgggaccccgc

SEQ ID NO: 5231 - DNA, 20 bp, Sus scrofa
cacctgcggggtcccagacg

SEQ ID NO: 5232 - DNA, 20 bp, Sus scrofa
acctgcggggtcccagacgc

SEQ ID NO: 5233 - DNA, 20 bp, Sus scrofa
gggtcggcgagcccgcgtct

SEQ ID NO: 5234 - DNA, 20 bp, Sus scrofa
ggggtcggcgagcccgcgtc

SEQ ID NO: 5235 - DNA, 20 bp, Sus scrofa
agacgcgggctcgccgaccc

SEQ ID NO: 5236 - DNA, 20 bp, Sus scrofa
gctcttgcccgcgccggggt

SEQ ID NO: 5237 - DNA, 20 bp, Sus scrofa
cgggctcgccgaccccggcg

SEQ ID NO: 5238 - DNA, 20 bp, Sus scrofa
gggctcgccgaccccggcgc

SEQ ID NO: 5239 - DNA, 20 bp, Sus scrofa
ctgcgctcttgcccgcgccg

SEQ ID NO: 5240 - DNA, 20 bp, Sus scrofa
gctgcgctcttgcccgcgcc

SEQ ID NO: 5241 - DNA, 20 bp, Sus scrofa
agctgcgctcttgcccgcgc

SEQ ID NO: 5242 - DNA, 20 bp, Sus scrofa
gcgggcaagagcgcagctcg

SEQ ID NO: 5243 - DNA, 20 bp, Sus scrofa
cgggcaagagcgcagctcgc

SEQ ID NO: 5244 - DNA, 20 bp, Sus scrofa
aagagcgcagctcgcgggct

SEQ ID NO: 5245 - DNA, 20 bp, Sus scrofa
gcgcagctcgcgggctcgga

SEQ ID NO: 5246 - DNA, 20 bp, Sus scrofa
cgcagctcgcgggctcggac

SEQ ID NO: 5247 - DNA, 20 bp, Sus scrofa
ctcgcgggctcggacgggaa

SEQ ID NO: 5248 - DNA, 20 bp, Sus scrofa
gcgggctcggacgggaaagg

SEQ ID NO: 5249 - DNA, 20 bp, Sus scrofa
cgggctcggacgggaaaggc

SEQ ID NO: 5250 - DNA, 20 bp, Sus scrofa
gctcggacgggaaaggcggg

SEQ ID NO: 5251 - DNA, 20 bp, Sus scrofa
ctcggacgggaaaggcgggc

SEQ ID NO: 5252 - DNA, 20 bp, Sus scrofa
gacgggaaaggcgggcgggc

SEQ ID NO: 5253 - DNA, 20 bp, Sus scrofa
gggaaaggcgggcgggcagg

SEQ ID NO: 5254 - DNA, 20 bp, Sus scrofa
ggaaaggcgggcgggcaggc

SEQ ID NO: 5255 - DNA, 20 bp, Sus scrofa
aaggcgggcgggcaggcggg

SEQ ID NO: 5256 - DNA, 20 bp, Sus scrofa
aggcgggcgggcaggcgggc

SEQ ID NO: 5257 - DNA, 20 bp, Sus scrofa
ggcgggcaggcgggcgggcg

SEQ ID NO: 5258 - DNA, 20 bp, Sus scrofa
gggcaggcgggcgggcgcgg

SEQ ID NO: 5259 - DNA, 20 bp, Sus scrofa
ggcaggcgggcgggcgcgga

SEQ ID NO: 5260 - DNA, 20 bp, Sus scrofa
gcaggcgggcgggcgcggag

SEQ ID NO: 5261 - DNA, 20 bp, Sus scrofa
caggcgggcgggcgcggagg

SEQ ID NO: 5262 - DNA, 20 bp, Sus scrofa
aggcgggcgggcgcggaggg

SEQ ID NO: 5263 - DNA, 20 bp, Sus scrofa
cggaggggggagcgagcgcg

SEQ ID NO: 5264 - DNA, 20 bp, Sus scrofa
ggaggggggagcgagcgcgc

SEQ ID NO: 5265 - DNA, 20 bp, Sus scrofa
agcgcgcgggattaactctt

SEQ ID NO: 5266 - DNA, 20 bp, Sus scrofa
gattaactctttggcgcccg

SEQ ID NO: 5267 - DNA, 20 bp, Sus scrofa
attaactctttggcgcccgc

SEQ ID NO: 5268 - DNA, 20 bp, Sus scrofa
ggacggccgcaggggcccgc

SEQ ID NO: 5269 - DNA, 20 bp, Sus scrofa
tggacggccgcaggggcccg

SEQ ID NO: 5270 - DNA, 20 bp, Sus scrofa
ttggcgcccgcgggcccctg

SEQ ID NO: 5271 - DNA, 20 bp, Sus scrofa
ccttccctggacggccgcag

SEQ ID NO: 5272 - DNA, 20 bp, Sus scrofa
gccttccctggacggccgca

SEQ ID NO: 5273 - DNA, 20 bp, Sus scrofa
cgccttccctggacggccgc

SEQ ID NO: 5274 - DNA, 20 bp, Sus scrofa
gcgggcccctgcggccgtcc

SEQ ID NO: 5275 - DNA, 20 bp, Sus scrofa
cgggcccctgcggccgtcca

SEQ ID NO: 5276 - DNA, 20 bp, Sus scrofa
accccaccgccttccctgga

SEQ ID NO: 5277 - DNA, 20 bp, Sus scrofa
cccctgcggccgtccaggga

SEQ ID NO: 5278 - DNA, 20 bp, Sus scrofa
ccccaccccaccgccttccc

SEQ ID NO: 5279 - DNA, 20 bp, Sus scrofa
ctgcggccgtccagggaagg

SEQ ID NO: 5280 - DNA, 20 bp, Sus scrofa
cggccgtccagggaaggcgg

SEQ ID NO: 5281 - DNA, 20 bp, Sus scrofa
ggccgtccagggaaggcggt

SEQ ID NO: 5282 - DNA, 20 bp, Sus scrofa
gccgtccagggaaggcggtg

SEQ ID NO: 5283 - DNA, 20 bp, Sus scrofa
gtccagggaaggcggtgggg

SEQ ID NO: 5284 - DNA, 20 bp, Sus scrofa
tccagggaaggcggtggggt

SEQ ID NO: 5285 - DNA, 20 bp, Sus scrofa
ccagggaaggcggtggggtg

SEQ ID NO: 5286 - DNA, 20 bp, Sus scrofa
cagggaaggcggtggggtgg

SEQ ID NO: 5287 - DNA, 20 bp, Sus scrofa
actttgagctcttcgcccgc

SEQ ID NO: 5288 - DNA, 20 bp, Sus scrofa
ctttgagctcttcgcccgcc

SEQ ID NO: 5289 - DNA, 20 bp, Sus scrofa
tttgagctcttcgcccgccg

SEQ ID NO: 5290 - DNA, 20 bp, Sus scrofa
cttcgggaaaggaccccggc

SEQ ID NO: 5291 - DNA, 20 bp, Sus scrofa
ccttcgggaaaggaccccgg

SEQ ID NO: 5292 - DNA, 20 bp, Sus scrofa
gctccttcgggaaaggaccc

SEQ ID NO: 5293 - DNA, 20 bp, Sus scrofa
cacacgcgctccttcgggaa

SEQ ID NO: 5294 - DNA, 20 bp, Sus scrofa
ccgccggggtcctttcccga

SEQ ID NO: 5295 - DNA, 20 bp, Sus scrofa
acacgcacacgcgctccttc

SEQ ID NO: 5296 - DNA, 20 bp, Sus scrofa
cacacgcacacgcgctcctt

SEQ ID NO: 5297 - DNA, 20 bp, Sus scrofa
cgaaggagcgcgtgtgcgtg

SEQ ID NO: 5298 - DNA, 20 bp, Sus scrofa
ggagcgcgtgtgcgtgtggc

SEQ ID NO: 5299 - DNA, 20 bp, Sus scrofa
gcgcgtgtgcgtgtggccgg

SEQ ID NO: 5300 - DNA, 20 bp, Sus scrofa
cctcctccctctcttgccgc

SEQ ID NO: 5301 - DNA, 20 bp, Sus scrofa
cgtgtggccggcggcaagag

SEQ ID NO: 5302 - DNA, 20 bp, Sus scrofa
gtgtggccggcggcaagaga

SEQ ID NO: 5303 - DNA, 20 bp, Sus scrofa
tggccggcggcaagagaggg

SEQ ID NO: 5304 - DNA, 20 bp, Sus scrofa
ccggcggcaagagagggagg

SEQ ID NO: 5305 - DNA, 20 bp, Sus scrofa
cggcggcaagagagggagga

SEQ ID NO: 5306 - DNA, 20 bp, Sus scrofa
ggcggcaagagagggaggag

SEQ ID NO: 5307 - DNA, 20 bp, Sus scrofa
gcggcaagagagggaggagg

SEQ ID NO: 5308 - DNA, 20 bp, Sus scrofa
aggagggggttgtgtaacgc

SEQ ID NO: 5309 - DNA, 20 bp, Sus scrofa
ggagggggttgtgtaacgct

SEQ ID NO: 5310 - DNA, 20 bp, Sus scrofa
atctcgggaggctgcaaaca

SEQ ID NO: 5311 - DNA, 20 bp, Sus scrofa
gcccggccgcgcatctcggg

SEQ ID NO: 5312 - DNA, 20 bp, Sus scrofa
tccgcccggccgcgcatctc

SEQ ID NO: 5313 - DNA, 20 bp, Sus scrofa
ctccgcccggccgcgcatct

SEQ ID NO: 5314 - DNA, 20 bp, Sus scrofa
ttgcagcctcccgagatgcg

SEQ ID NO: 5315 - DNA, 20 bp, Sus scrofa
agcctcccgagatgcgcggc

SEQ ID NO: 5316 - DNA, 20 bp, Sus scrofa
gcctcccgagatgcgcggcc

SEQ ID NO: 5317 - DNA, 20 bp, Sus scrofa
tcccgagatgcgcggccggg

SEQ ID NO: 5318 - DNA, 20 bp, Sus scrofa
cgagatgcgcggccgggcgg

SEQ ID NO: 5319 - DNA, 20 bp, Sus scrofa
ccgtaggcccggcctccgcc

SEQ ID NO: 5320 - DNA, 20 bp, Sus scrofa
atgcgcggccgggcggaggc

SEQ ID NO: 5321 - DNA, 20 bp, Sus scrofa
tgcgcggccgggcggaggcc

SEQ ID NO: 5322 - DNA, 20 bp, Sus scrofa
ccgggcggaggccgggccta

SEQ ID NO: 5323 - DNA, 20 bp, Sus scrofa
gcgcggctcctccgtaggcc

SEQ ID NO: 5324 - DNA, 20 bp, Sus scrofa
ggcggaggccgggcctacgg

SEQ ID NO: 5325 - DNA, 20 bp, Sus scrofa
tggcagcgcggctcctccgt

SEQ ID NO: 5326 - DNA, 20 bp, Sus scrofa
cccagtccggactggcagcg

SEQ ID NO: 5327 - DNA, 20 bp, Sus scrofa
gaggagccgcgctgccagtc

SEQ ID NO: 5328 - DNA, 20 bp, Sus scrofa
gcagcgggcccagtccggac

SEQ ID NO: 5329 - DNA, 20 bp, Sus scrofa
gccgcgctgccagtccggac

SEQ ID NO: 5330 - DNA, 20 bp, Sus scrofa
ccgcgctgccagtccggact

SEQ ID NO: 5331 - DNA, 20 bp, Sus scrofa
ggcccgcagcgggcccagtc

SEQ ID NO: 5332 - DNA, 20 bp, Sus scrofa
agtccggactgggcccgctg

SEQ ID NO: 5333 - DNA, 20 bp, Sus scrofa
gtccggactgggcccgctgc

SEQ ID NO: 5334 - DNA, 20 bp, Sus scrofa
aggccggcctggcccgcagc

SEQ ID NO: 5335 - DNA, 20 bp, Sus scrofa
gaggccggcctggcccgcag

SEQ ID NO: 5336 - DNA, 20 bp, Sus scrofa
gactgggcccgctgcgggcc

SEQ ID NO: 5337 - DNA, 20 bp, Sus scrofa
gggcccgctgcgggccaggc

SEQ ID NO: 5338 - DNA, 20 bp, Sus scrofa
ggggcacgcggaggccggcc

SEQ ID NO: 5339 - DNA, 20 bp, Sus scrofa
ggccgggggcacgcggaggc

SEQ ID NO: 5340 - DNA, 20 bp, Sus scrofa
ggccggccgggggcacgcgg

SEQ ID NO: 5341 - DNA, 20 bp, Sus scrofa
ccgggccggccgggggcacg

SEQ ID NO: 5342 - DNA, 20 bp, Sus scrofa
ggccggcctccgcgtgcccc

SEQ ID NO: 5343 - DNA, 20 bp, Sus scrofa
ggcctccgcgtgcccccggc

SEQ ID NO: 5344 - DNA, 20 bp, Sus scrofa
ccccctcccgggccggccgg

SEQ ID NO: 5345 - DNA, 20 bp, Sus scrofa
gccccctcccgggccggccg

SEQ ID NO: 5346 - DNA, 20 bp, Sus scrofa
agccccctcccgggccggcc

SEQ ID NO: 5347 - DNA, 20 bp, Sus scrofa
gagccccctcccgggccggc

SEQ ID NO: 5348 - DNA, 20 bp, Sus scrofa
ccgcgtgcccccggccggcc

SEQ ID NO: 5349 - DNA, 20 bp, Sus scrofa
cgcgtgcccccggccggccc

SEQ ID NO: 5350 - DNA, 20 bp, Sus scrofa
gcccgagccccctcccgggc

SEQ ID NO: 5351 - DNA, 20 bp, Sus scrofa
gtgcccccggccggcccggg

SEQ ID NO: 5352 - DNA, 20 bp, Sus scrofa
tgcccccggccggcccggga

SEQ ID NO: 5353 - DNA, 20 bp, Sus scrofa
gcccccggccggcccgggag

SEQ ID NO: 5354 - DNA, 20 bp, Sus scrofa
cccccggccggcccgggagg

SEQ ID NO: 5355 - DNA, 20 bp, Sus scrofa
ctccgcccgagccccctccc

SEQ ID NO: 5356 - DNA, 20 bp, Sus scrofa
gctccgcccgagccccctcc

SEQ ID NO: 5357 - DNA, 20 bp, Sus scrofa
ggccggcccgggagggggct

SEQ ID NO: 5358 - DNA, 20 bp, Sus scrofa
gccggcccgggagggggctc

SEQ ID NO: 5359 - DNA, 20 bp, Sus scrofa
ggcccgggagggggctcggg

SEQ ID NO: 5360 - DNA, 20 bp, Sus scrofa
ggagggggctcgggcggagc

SEQ ID NO: 5361 - DNA, 20 bp, Sus scrofa
gggggctcgggcggagcagg

SEQ ID NO: 5362 - DNA, 20 bp, Sus scrofa
agcaggaggctcctccagcc

SEQ ID NO: 5363 - DNA, 20 bp, Sus scrofa
caaccgcgagacctggctgg

SEQ ID NO: 5364 - DNA, 20 bp, Sus scrofa
cgccaaccgcgagacctggc

SEQ ID NO: 5365 - DNA, 20 bp, Sus scrofa
ccggcgccaaccgcgagacc

SEQ ID NO: 5366 - DNA, 20 bp, Sus scrofa
gctcctccagccaggtctcg

SEQ ID NO: 5367 - DNA, 20 bp, Sus scrofa
ctccagccaggtctcgcggt

SEQ ID NO: 5368 - DNA, 20 bp, Sus scrofa
ccaggtctcgcggttggcgc

SEQ ID NO: 5369 - DNA, 20 bp, Sus scrofa
tctcgcggttggcgccggtc

SEQ ID NO: 5370 - DNA, 20 bp, Sus scrofa
cgctcccgtcctggccggac

SEQ ID NO: 5371 - DNA, 20 bp, Sus scrofa
cggttggcgccggtccggcc

SEQ ID NO: 5372 - DNA, 20 bp, Sus scrofa
ccttccgctcccgtcctggc

SEQ ID NO: 5373 - DNA, 20 bp, Sus scrofa
tggcgccggtccggccagga

SEQ ID NO: 5374 - DNA, 20 bp, Sus scrofa
ggcgccggtccggccaggac

SEQ ID NO: 5375 - DNA, 20 bp, Sus scrofa
tcgtccttccgctcccgtcc

SEQ ID NO: 5376 - DNA, 20 bp, Sus scrofa
cggtccggccaggacgggag

SEQ ID NO: 5377 - DNA, 20 bp, Sus scrofa
ccggccaggacgggagcgga

SEQ ID NO: 5378 - DNA, 20 bp, Sus scrofa
gggagcggaaggacgaacag

SEQ ID NO: 5379 - DNA, 20 bp, Sus scrofa
ggagcggaaggacgaacaga

SEQ ID NO: 5380 - DNA, 20 bp, Sus scrofa
cagagggttctttgcctcca

SEQ ID NO: 5381 - DNA, 20 bp, Sus scrofa
agagggttctttgcctccaa

SEQ ID NO: 5382 - DNA, 20 bp, Sus scrofa
gagggttctttgcctccaag

SEQ ID NO: 5383 - DNA, 20 bp, Sus scrofa
agggttctttgcctccaagg

SEQ ID NO: 5384 - DNA, 20 bp, Sus scrofa
gggcttcctgtcccccttgg

SEQ ID NO: 5385 - DNA, 20 bp, Sus scrofa
agggggcttcctgtccccct

SEQ ID NO: 5386 - DNA, 20 bp, Sus scrofa
tctttgcctccaagggggac

SEQ ID NO: 5387 - DNA, 20 bp, Sus scrofa
agggggacaggaagccccct

SEQ ID NO: 5388 - DNA, 20 bp, Sus scrofa
gggggacaggaagccccctc

SEQ ID NO: 5389 - DNA, 20 bp, Sus scrofa
aagccccccggcgcccgagg

SEQ ID NO: 5390 - DNA, 20 bp, Sus scrofa
caagccccccggcgcccgag

SEQ ID NO: 5391 - DNA, 20 bp, Sus scrofa
ccaagccccccggcgcccga

SEQ ID NO: 5392 - DNA, 20 bp, Sus scrofa
cccaagccccccggcgcccg

SEQ ID NO: 5393 - DNA, 20 bp, Sus scrofa
caggaagccccctcgggcgc

SEQ ID NO: 5394 - DNA, 20 bp, Sus scrofa
aggaagccccctcgggcgcc

SEQ ID NO: 5395 - DNA, 20 bp, Sus scrofa
ggaagccccctcgggcgccg

SEQ ID NO: 5396 - DNA, 20 bp, Sus scrofa
gaagccccctcgggcgccgg

SEQ ID NO: 5397 - DNA, 20 bp, Sus scrofa
aagccccctcgggcgccggg

SEQ ID NO: 5398 - DNA, 20 bp, Sus scrofa
ccgcgcccgcccaagccccc

SEQ ID NO: 5399 - DNA, 20 bp, Sus scrofa
ccctcgggcgccggggggct

SEQ ID NO: 5400 - DNA, 20 bp, Sus scrofa
cctcgggcgccggggggctt

SEQ ID NO: 5401 - DNA, 20 bp, Sus scrofa
cgggcgccggggggcttggg

SEQ ID NO: 5402 - DNA, 20 bp, Sus scrofa
gggcgccggggggcttgggc

SEQ ID NO: 5403 - DNA, 20 bp, Sus scrofa
ccggggggcttgggcgggcg

SEQ ID NO: 5404 - DNA, 20 bp, Sus scrofa
gggcttgggcgggcgcggcc

SEQ ID NO: 5405 - DNA, 20 bp, Sus scrofa
ctccccagctcgcgcgcgcc

SEQ ID NO: 5406 - DNA, 20 bp, Sus scrofa
gcggcctggcgcgcgcgagc

SEQ ID NO: 5407 - DNA, 20 bp, Sus scrofa
cggcctggcgcgcgcgagct

SEQ ID NO: 5408 - DNA, 20 bp, Sus scrofa
ggcctggcgcgcgcgagctg

SEQ ID NO: 5409 - DNA, 20 bp, Sus scrofa
ctggcgcgcgcgagctgggg

SEQ ID NO: 5410 - DNA, 20 bp, Sus scrofa
tggcgcgcgcgagctgggga

SEQ ID NO: 5411 - DNA, 20 bp, Sus scrofa
ggcgcgcgcgagctggggag

SEQ ID NO: 5412 - DNA, 20 bp, Sus scrofa
gagctggggaggggcgagcc

SEQ ID NO: 5413 - DNA, 20 bp, Sus scrofa
agctggggaggggcgagccc

SEQ ID NO: 5414 - DNA, 20 bp, Sus scrofa
tggggaggggcgagcccggg

SEQ ID NO: 5415 - DNA, 20 bp, Sus scrofa
ggaggggcgagcccgggtgg

SEQ ID NO: 5416 - DNA, 20 bp, Sus scrofa
ttgcgccacctccgccaccc

SEQ ID NO: 5417 - DNA, 20 bp, Sus scrofa
gttgcgccacctccgccacc

SEQ ID NO: 5418 - DNA, 20 bp, Sus scrofa
ggggcgagcccgggtggcgg

SEQ ID NO: 5419 - DNA, 20 bp, Sus scrofa
gcgagcccgggtggcggagg

SEQ ID NO: 5420 - DNA, 20 bp, Sus scrofa
cttggcctcgggaggggcgt

SEQ ID NO: 5421 - DNA, 20 bp, Sus scrofa
cgcaaccgacgcccctcccg

SEQ ID NO: 5422 - DNA, 20 bp, Sus scrofa
ttcaaacttggcctcgggag

SEQ ID NO: 5423 - DNA, 20 bp, Sus scrofa
tttcaaacttggcctcggga

SEQ ID NO: 5424 - DNA, 20 bp, Sus scrofa
ttttcaaacttggcctcggg

SEQ ID NO: 5425 - DNA, 20 bp, Sus scrofa
cttttttcaaacttggcctc

SEQ ID NO: 5426 - DNA, 20 bp, Sus scrofa
ccttttttcaaacttggcct

SEQ ID NO: 5427 - DNA, 20 bp, Sus scrofa
ccgactccttttttcaaact

SEQ ID NO: 5428 - DNA, 20 bp, Sus scrofa
ccgaggccaagtttgaaaaa

SEQ ID NO: 5429 - DNA, 20 bp, Sus scrofa
ccaagtttgaaaaaaggagt

SEQ ID NO: 5430 - DNA, 20 bp, Sus scrofa
ttttaggcttgaaaaatggc

SEQ ID NO: 5431 - DNA, 20 bp, Sus scrofa
tttttaggcttgaaaaatgg

SEQ ID NO: 5432 - DNA, 20 bp, Sus scrofa
ttatttttaggcttgaaaaa

SEQ ID NO: 5433 - DNA, 20 bp, Sus scrofa
gtagacaaagttttattttt

SEQ ID NO: 5434 - DNA, 20 bp, Sus scrofa
tcgaaaggggcgcgagagat

SEQ ID NO: 5435 - DNA, 20 bp, Sus scrofa
gaaggcctgggggtcgaaag

SEQ ID NO: 5436 - DNA, 20 bp, Sus scrofa
ggaaggcctgggggtcgaaa

SEQ ID NO: 5437 - DNA, 20 bp, Sus scrofa
gggaaggcctgggggtcgaa

SEQ ID NO: 5438 - DNA, 20 bp, Sus scrofa
tcgcgcccctttcgaccccc

SEQ ID NO: 5439 - DNA, 20 bp, Sus scrofa
cgggactggggaaggcctgg

SEQ ID NO: 5440 - DNA, 20 bp, Sus scrofa
ccgggactggggaaggcctg

SEQ ID NO: 5441 - DNA, 20 bp, Sus scrofa
accgggactggggaaggcct

SEQ ID NO: 5442 - DNA, 20 bp, Sus scrofa
gaccgggactggggaaggcc

SEQ ID NO: 5443 - DNA, 20 bp, Sus scrofa
ttggagaccgggactgggga

SEQ ID NO: 5444 - DNA, 20 bp, Sus scrofa
ccccaggccttccccagtcc

SEQ ID NO: 5445 - DNA, 20 bp, Sus scrofa
gcatttggagaccgggactg

SEQ ID NO: 5446 - DNA, 20 bp, Sus scrofa
tgcatttggagaccgggact

SEQ ID NO: 5447 - DNA, 20 bp, Sus scrofa
ctgcatttggagaccgggac

SEQ ID NO: 5448 - DNA, 20 bp, Sus scrofa
gcggcctgcatttggagacc

SEQ ID NO: 5449 - DNA, 20 bp, Sus scrofa
cgcggcctgcatttggagac

SEQ ID NO: 5450 - DNA, 20 bp, Sus scrofa
cagtcccggtctccaaatgc

SEQ ID NO: 5451 - DNA, 20 bp, Sus scrofa
ggccgagcgcggcctgcatt

SEQ ID NO: 5452 - DNA, 20 bp, Sus scrofa
ctccaaatgcaggccgcgct

SEQ ID NO: 5453 - DNA, 20 bp, Sus scrofa
ctgctagctcgggccgagcg

SEQ ID NO: 5454 - DNA, 20 bp, Sus scrofa
tacgccacaactgctagctc

SEQ ID NO: 5455 - DNA, 20 bp, Sus scrofa
ttacgccacaactgctagct

SEQ ID NO: 5456 - DNA, 20 bp, Sus scrofa
tcggcccgagctagcagttg

SEQ ID NO: 5457 - DNA, 20 bp, Sus scrofa
gctagcagttgtggcgtaag

SEQ ID NO: 5458 - DNA, 20 bp, Sus scrofa
ccgccgcggcgcggggggga

SEQ ID NO: 5459 - DNA, 20 bp, Sus scrofa
gccgccgcggcgcggggggg

SEQ ID NO: 5460 - DNA, 20 bp, Sus scrofa
tccgccgccgcggcgcgggg

SEQ ID NO: 5461 - DNA, 20 bp, Sus scrofa
ctccgccgccgcggcgcggg

SEQ ID NO: 5462 - DNA, 20 bp, Sus scrofa
gctccgccgccgcggcgcgg

SEQ ID NO: 5463 - DNA, 20 bp, Sus scrofa
ggctccgccgccgcggcgcg

SEQ ID NO: 5464 - DNA, 20 bp, Sus scrofa
tctccctcccccccgcgccg

SEQ ID NO: 5465 - DNA, 20 bp, Sus scrofa
gggctccgccgccgcggcgc

SEQ ID NO: 5466 - DNA, 20 bp, Sus scrofa
cgggctccgccgccgcggcg

SEQ ID NO: 5467 - DNA, 20 bp, Sus scrofa
ccctcccccccgcgccgcgg

SEQ ID NO: 5468 - DNA, 20 bp, Sus scrofa
tcccccccgcgccgcggcgg

SEQ ID NO: 5469 - DNA, 20 bp, Sus scrofa
gcccccgggctccgccgccg

SEQ ID NO: 5470 - DNA, 20 bp, Sus scrofa
cgcgccgcggcggcggagcc

SEQ ID NO: 5471 - DNA, 20 bp, Sus scrofa
gcgccgcggcggcggagccc

SEQ ID NO: 5472 - DNA, 20 bp, Sus scrofa
cgccgcggcggcggagcccg

SEQ ID NO: 5473 - DNA, 20 bp, Sus scrofa
gccgcggcggcggagcccgg

SEQ ID NO: 5474 - DNA, 20 bp, Sus scrofa
cctcccgggcaggggccccc

SEQ ID NO: 5475 - DNA, 20 bp, Sus scrofa
acctcccgggcaggggcccc

SEQ ID NO: 5476 - DNA, 20 bp, Sus scrofa
ggagcccgggggcccctgcc

SEQ ID NO: 5477 - DNA, 20 bp, Sus scrofa
gagcccgggggcccctgccc

SEQ ID NO: 5478 - DNA, 20 bp, Sus scrofa
ggggccaacctcccgggcag

SEQ ID NO: 5479 - DNA, 20 bp, Sus scrofa
aggggccaacctcccgggca

SEQ ID NO: 5480 - DNA, 20 bp, Sus scrofa
gaggggccaacctcccgggc

SEQ ID NO: 5481 - DNA, 20 bp, Sus scrofa
cccgggggcccctgcccggg

SEQ ID NO: 5482 - DNA, 20 bp, Sus scrofa
caccgaggggccaacctccc

SEQ ID NO: 5483 - DNA, 20 bp, Sus scrofa
ggggcccctgcccgggaggt

SEQ ID NO: 5484 - DNA, 20 bp, Sus scrofa
acaccgaggggccaacctcc

SEQ ID NO: 5485 - DNA, 20 bp, Sus scrofa
tgcccgggaggttggcccct

SEQ ID NO: 5486 - DNA, 20 bp, Sus scrofa
cgccgcccgcccacaccgag

SEQ ID NO: 5487 - DNA, 20 bp, Sus scrofa
gggaggttggcccctcggtg

SEQ ID NO: 5488 - DNA, 20 bp, Sus scrofa
ccgccgcccgcccacaccga

SEQ ID NO: 5489 - DNA, 20 bp, Sus scrofa
ggaggttggcccctcggtgt

SEQ ID NO: 5490 - DNA, 20 bp, Sus scrofa
gccgccgcccgcccacaccg

SEQ ID NO: 5491 - DNA, 20 bp, Sus scrofa
ggttggcccctcggtgtggg

SEQ ID NO: 5492 - DNA, 20 bp, Sus scrofa
gttggcccctcggtgtgggc

SEQ ID NO: 5493 - DNA, 20 bp, Sus scrofa
ggcccctcggtgtgggcggg

SEQ ID NO: 5494 - DNA, 20 bp, Sus scrofa
ccctcggtgtgggcgggcgg

SEQ ID NO: 5495 - DNA, 20 bp, Sus scrofa
ggcgcgcctgggctgacgcg

SEQ ID NO: 5496 - DNA, 20 bp, Sus scrofa
gcggctcctcgcgtcagccc

SEQ ID NO: 5497 - DNA, 20 bp, Sus scrofa
cgtcggcctgtggcgcgcct

SEQ ID NO: 5498 - DNA, 20 bp, Sus scrofa
gcgtcggcctgtggcgcgcc

SEQ ID NO: 5499 - DNA, 20 bp, Sus scrofa
cgtcagcccaggcgcgccac

SEQ ID NO: 5500 - DNA, 20 bp, Sus scrofa
catggcgctgcgtcggcctg

SEQ ID NO: 5501 - DNA, 20 bp, Sus scrofa
ccgccaacatggcgctgcgt

SEQ ID NO: 5502 - DNA, 20 bp, Sus scrofa
aggccgacgcagcgccatgt

SEQ ID NO: 5503 - DNA, 20 bp, Sus scrofa
ccgacgcagcgccatgttgg

SEQ ID NO: 5504 - DNA, 20 bp, Sus scrofa
gagacgggtgcccgccaaca

SEQ ID NO: 5505 - DNA, 20 bp, Sus scrofa
cgacgcagcgccatgttggc

SEQ ID NO: 5506 - DNA, 20 bp, Sus scrofa
ctcacgcggcggaaggagac

SEQ ID NO: 5507 - DNA, 20 bp, Sus scrofa
actcacgcggcggaaggaga

SEQ ID NO: 5508 - DNA, 20 bp, Sus scrofa
aggccgactcacgcggcgga

SEQ ID NO: 5509 - DNA, 20 bp, Sus scrofa
ccgcaggccgactcacgcgg

SEQ ID NO: 5510 - DNA, 20 bp, Sus scrofa
agcccgcaggccgactcacg

SEQ ID NO: 5511 - DNA, 20 bp, Sus scrofa
tctccttccgccgcgtgagt

SEQ ID NO: 5512 - DNA, 20 bp, Sus scrofa
ccgccgcgtgagtcggcctg

SEQ ID NO: 5513 - DNA, 20 bp, Sus scrofa
cgccgcgtgagtcggcctgc

SEQ ID NO: 5514 - DNA, 20 bp, Sus scrofa
gccggacggacagagcccgc

SEQ ID NO: 5515 - DNA, 20 bp, Sus scrofa
gcctgcgggctctgtccgtc

SEQ ID NO: 5516 - DNA, 20 bp, Sus scrofa
tgcgggcgggcagggccgga

SEQ ID NO: 5517 - DNA, 20 bp, Sus scrofa
ccggtgcgggcgggcagggc

SEQ ID NO: 5518 - DNA, 20 bp, Sus scrofa
accgccggtgcgggcgggca

SEQ ID NO: 5519 - DNA, 20 bp, Sus scrofa
caccgccggtgcgggcgggc

SEQ ID NO: 5520 - DNA, 20 bp, Sus scrofa
gagccaccgccggtgcgggc

SEQ ID NO: 5521 - DNA, 20 bp, Sus scrofa
agagccaccgccggtgcggg

SEQ ID NO: 5522 - DNA, 20 bp, Sus scrofa
ccggccctgcccgcccgcac

SEQ ID NO: 5523 - DNA, 20 bp, Sus scrofa
ctcagagccaccgccggtgc

SEQ ID NO: 5524 - DNA, 20 bp, Sus scrofa
gccctgcccgcccgcaccgg

SEQ ID NO: 5525 - DNA, 20 bp, Sus scrofa
gctcagagccaccgccggtg

SEQ ID NO: 5526 - DNA, 20 bp, Sus scrofa
ctgcccgcccgcaccggcgg

SEQ ID NO: 5527 - DNA, 20 bp, Sus scrofa
cggcggctcagagccaccgc

SEQ ID NO: 5528 - DNA, 20 bp, Sus scrofa
aggctcggccaagggagcgg

SEQ ID NO: 5529 - DNA, 20 bp, Sus scrofa
gctctgagccgccgctccct

SEQ ID NO: 5530 - DNA, 20 bp, Sus scrofa
cgcaggctcggccaagggag

SEQ ID NO: 5531 - DNA, 20 bp, Sus scrofa
caaaccgcaggctcggccaa

SEQ ID NO: 5532 - DNA, 20 bp, Sus scrofa
acaaaccgcaggctcggcca

SEQ ID NO: 5533 - DNA, 20 bp, Sus scrofa
cgctcccttggccgagcctg

SEQ ID NO: 5534 - DNA, 20 bp, Sus scrofa
cgccaaacaaaccgcaggct

SEQ ID NO: 5535 - DNA, 20 bp, Sus scrofa
gcccgcgccaaacaaaccgc

SEQ ID NO: 5536 - DNA, 20 bp, Sus scrofa
ggccgagcctgcggtttgtt

SEQ ID NO: 5537 - DNA, 20 bp, Sus scrofa
agcctgcggtttgtttggcg

SEQ ID NO: 5538 - DNA, 20 bp, Sus scrofa
gcctgcggtttgtttggcgc

SEQ ID NO: 5539 - DNA, 20 bp, Sus scrofa
tgtttggcgcgggcctcgcc

SEQ ID NO: 5540 - DNA, 20 bp, Sus scrofa
gtttggcgcgggcctcgcca

SEQ ID NO: 5541 - DNA, 20 bp, Sus scrofa
gtgcgagccgagccctggcg

SEQ ID NO: 5542 - DNA, 20 bp, Sus scrofa
gcgcgggcctcgccagggct

SEQ ID NO: 5543 - DNA, 20 bp, Sus scrofa
cgccagtgcgagccgagccc

SEQ ID NO: 5544 - DNA, 20 bp, Sus scrofa
cgccagggctcggctcgcac

SEQ ID NO: 5545 - DNA, 20 bp, Sus scrofa
cagggctcggctcgcactgg

SEQ ID NO: 5546 - DNA, 20 bp, Sus scrofa
agggctcggctcgcactggc

SEQ ID NO: 5547 - DNA, 20 bp, Sus scrofa
tcggcgacggccggagcgct

SEQ ID NO: 5548 - DNA, 20 bp, Sus scrofa
ctggcgggagccgagcgctc

SEQ ID NO: 5549 - DNA, 20 bp, Sus scrofa
aaagatgagtcggcgacggc

SEQ ID NO: 5550 - DNA, 20 bp, Sus scrofa
cccgaaagatgagtcggcga

SEQ ID NO: 5551 - DNA, 20 bp, Sus scrofa
agcgcgcccgaaagatgagt

SEQ ID NO: 5552 - DNA, 20 bp, Sus scrofa
gccgtcgccgactcatcttt

SEQ ID NO: 5553 - DNA, 20 bp, Sus scrofa
ccgtcgccgactcatctttc

SEQ ID NO: 5554 - DNA, 20 bp, Sus scrofa
tttaagaaggggggaggggg

SEQ ID NO: 5555 - DNA, 20 bp, Sus scrofa
ccttttaagaaggggggagg

SEQ ID NO: 5556 - DNA, 20 bp, Sus scrofa
cccttttaagaaggggggag

SEQ ID NO: 5557 - DNA, 20 bp, Sus scrofa
gcccttttaagaagggggga

SEQ ID NO: 5558 - DNA, 20 bp, Sus scrofa
tgcccttttaagaagggggg

SEQ ID NO: 5559 - DNA, 20 bp, Sus scrofa
cgttgcccttttaagaaggg

SEQ ID NO: 5560 - DNA, 20 bp, Sus scrofa
ccgttgcccttttaagaagg

SEQ ID NO: 5561 - DNA, 20 bp, Sus scrofa
gccgttgcccttttaagaag

SEQ ID NO: 5562 - DNA, 20 bp, Sus scrofa
tgccgttgcccttttaagaa

SEQ ID NO: 5563 - DNA, 20 bp, Sus scrofa
ctgccgttgcccttttaaga

SEQ ID NO: 5564 - DNA, 20 bp, Sus scrofa
ccccctccccccttcttaaa

SEQ ID NO: 5565 - DNA, 20 bp, Sus scrofa
cccctccccccttcttaaaa

SEQ ID NO: 5566 - DNA, 20 bp, Sus scrofa
cccccttcttaaaagggcaa

SEQ ID NO: 5567 - DNA, 20 bp, Sus scrofa
cttcttaaaagggcaacggc

SEQ ID NO: 5568 - DNA, 20 bp, Sus scrofa
cttaaaagggcaacggcagg

SEQ ID NO: 5569 - DNA, 20 bp, Sus scrofa
cccgcgactaggggcggagg

SEQ ID NO: 5570 - DNA, 20 bp, Sus scrofa
gtacccgcgactaggggcgg

SEQ ID NO: 5571 - DNA, 20 bp, Sus scrofa
tctgtacccgcgactagggg

SEQ ID NO: 5572 - DNA, 20 bp, Sus scrofa
ccgtctgtacccgcgactag

SEQ ID NO: 5573 - DNA, 20 bp, Sus scrofa
gccgcctccgcccctagtcg

SEQ ID NO: 5574 - DNA, 20 bp, Sus scrofa
cccgtctgtacccgcgacta

SEQ ID NO: 5575 - DNA, 20 bp, Sus scrofa
ccgcctccgcccctagtcgc

SEQ ID NO: 5576 - DNA, 20 bp, Sus scrofa
gcccgtctgtacccgcgact

SEQ ID NO: 5577 - DNA, 20 bp, Sus scrofa
cccctagtcgcgggtacaga

SEQ ID NO: 5578 - DNA, 20 bp, Sus scrofa
ccctagtcgcgggtacagac

SEQ ID NO: 5579 - DNA, 20 bp, Sus scrofa
tcgcgggtacagacgggcct

SEQ ID NO: 5580 - DNA, 20 bp, Sus scrofa
ccggcaagcaagcacagccg

SEQ ID NO: 5581 - DNA, 20 bp, Sus scrofa
cctcggctgtgcttgcttgc

SEQ ID NO: 5582 - DNA, 20 bp, Sus scrofa
ctcggctgtgcttgcttgcc

SEQ ID NO: 5583 - DNA, 20 bp, Sus scrofa
ggctgtgcttgcttgccggg

SEQ ID NO: 5584 - DNA, 20 bp, Sus scrofa
gctgtgcttgcttgccgggc

SEQ ID NO: 5585 - DNA, 20 bp, Sus scrofa
cgtgcggggcagcgcccgcc

SEQ ID NO: 5586 - DNA, 20 bp, Sus scrofa
gcggctctgaagcacgtgcg

SEQ ID NO: 5587 - DNA, 20 bp, Sus scrofa
tgcggctctgaagcacgtgc

SEQ ID NO: 5588 - DNA, 20 bp, Sus scrofa
ctgcggctctgaagcacgtg

SEQ ID NO: 5589 - DNA, 20 bp, Sus scrofa
cgagcaccggcctggatctg

SEQ ID NO: 5590 - DNA, 20 bp, Sus scrofa
tgcttcagagccgcagatcc

SEQ ID NO: 5591 - DNA, 20 bp, Sus scrofa
tcagagccgcagatccaggc

SEQ ID NO: 5592 - DNA, 20 bp, Sus scrofa
gcggcaggcgagcaccggcc

SEQ ID NO: 5593 - DNA, 20 bp, Sus scrofa
gagccgcggcaggcgagcac

SEQ ID NO: 5594 - DNA, 20 bp, Sus scrofa
aggccggtgctcgcctgccg

SEQ ID NO: 5595 - DNA, 20 bp, Sus scrofa
gcgactcacggagccgcggc

SEQ ID NO: 5596 - DNA, 20 bp, Sus scrofa
accagcgactcacggagccg

SEQ ID NO: 5597 - DNA, 20 bp, Sus scrofa
caaggcccaccagcgactca

SEQ ID NO: 5598 - DNA, 20 bp, Sus scrofa
gccgcggctccgtgagtcgc

SEQ ID NO: 5599 - DNA, 20 bp, Sus scrofa
gcggctccgtgagtcgctgg

SEQ ID NO: 5600 - DNA, 20 bp, Sus scrofa
cggctccgtgagtcgctggt

SEQ ID NO: 5601 - DNA, 20 bp, Sus scrofa
aataaagacgtgactcttca

SEQ ID NO: 5602 - DNA, 20 bp, Sus scrofa
tctacttcgcggggagggcg

SEQ ID NO: 5603 - DNA, 20 bp, Sus scrofa
ctctacttcgcggggagggc

SEQ ID NO: 5604 - DNA, 20 bp, Sus scrofa
gctctacttcgcggggaggg

SEQ ID NO: 5605 - DNA, 20 bp, Sus scrofa
gccgctctacttcgcgggga

SEQ ID NO: 5606 - DNA, 20 bp, Sus scrofa
agccgctctacttcgcgggg

SEQ ID NO: 5607 - DNA, 20 bp, Sus scrofa
ggaagccgctctacttcgcg

SEQ ID NO: 5608 - DNA, 20 bp, Sus scrofa
gggaagccgctctacttcgc

SEQ ID NO: 5609 - DNA, 20 bp, Sus scrofa
cgggaagccgctctacttcg

SEQ ID NO: 5610 - DNA, 20 bp, Sus scrofa
gccctccccgcgaagtagag

SEQ ID NO: 5611 - DNA, 20 bp, Sus scrofa
cgaagtagagcggcttcccg

SEQ ID NO: 5612 - DNA, 20 bp, Sus scrofa
gtagagcggcttcccgcggc

SEQ ID NO: 5613 - DNA, 20 bp, Sus scrofa
tagagcggcttcccgcggca

SEQ ID NO: 5614 - DNA, 20 bp, Sus scrofa
atggccccgcgccctgccgc

SEQ ID NO: 5615 - DNA, 20 bp, Sus scrofa
catggccccgcgccctgccg

SEQ ID NO: 5616 - DNA, 20 bp, Sus scrofa
cggcttcccgcggcagggcg

SEQ ID NO: 5617 - DNA, 20 bp, Sus scrofa
ggcttcccgcggcagggcgc

SEQ ID NO: 5618 - DNA, 20 bp, Sus scrofa
gcttcccgcggcagggcgcg

SEQ ID NO: 5619 - DNA, 20 bp, Sus scrofa
agcgctggcgccaggaaaca

SEQ ID NO: 5620 - DNA, 20 bp, Sus scrofa
gggcgcggggccatgtttcc

SEQ ID NO: 5621 - DNA, 20 bp, Sus scrofa
ggcctcccagcgctggcgcc

SEQ ID NO: 5622 - DNA, 20 bp, Sus scrofa
atgtttcctggcgccagcgc

SEQ ID NO: 5623 - DNA, 20 bp, Sus scrofa
tgtttcctggcgccagcgct

SEQ ID NO: 5624 - DNA, 20 bp, Sus scrofa
gaggcgcggcctcccagcgc

SEQ ID NO: 5625 - DNA, 20 bp, Sus scrofa
ttcctggcgccagcgctggg

SEQ ID NO: 5626 - DNA, 20 bp, Sus scrofa
gaggggttctggcggaggcg

SEQ ID NO: 5627 - DNA, 20 bp, Sus scrofa
ccgcggaggggttctggcgg

SEQ ID NO: 5628 - DNA, 20 bp, Sus scrofa
cacccgcggaggggttctgg

SEQ ID NO: 5629 - DNA, 20 bp, Sus scrofa
actcacccgcggaggggttc

SEQ ID NO: 5630 - DNA, 20 bp, Sus scrofa
cctccgccagaacccctccg

SEQ ID NO: 5631 - DNA, 20 bp, Sus scrofa
ctccgccagaacccctccgc

SEQ ID NO: 5632 - DNA, 20 bp, Sus scrofa
gacgccactcacccgcggag

SEQ ID NO: 5633 - DNA, 20 bp, Sus scrofa
ggacgccactcacccgcgga

SEQ ID NO: 5634 - DNA, 20 bp, Sus scrofa
gggacgccactcacccgcgg

SEQ ID NO: 5635 - DNA, 20 bp, Sus scrofa
caggggacgccactcacccg

SEQ ID NO: 5636 - DNA, 20 bp, Sus scrofa
agaacccctccgcgggtgag

SEQ ID NO: 5637 - DNA, 20 bp, Sus scrofa
cgcgggtgagtggcgtcccc

SEQ ID NO: 5638 - DNA, 20 bp, Sus scrofa
ccgggccgcccctctgccag

SEQ ID NO: 5639 - DNA, 20 bp, Sus scrofa
tgagtggcgtcccctggcag

SEQ ID NO: 5640 - DNA, 20 bp, Sus scrofa
cccgggccgcccctctgcca

SEQ ID NO: 5641 - DNA, 20 bp, Sus scrofa
gagtggcgtcccctggcaga

SEQ ID NO: 5642 - DNA, 20 bp, Sus scrofa
ccccgggccgcccctctgcc

SEQ ID NO: 5643 - DNA, 20 bp, Sus scrofa
agtggcgtcccctggcagag

SEQ ID NO: 5644 - DNA, 20 bp, Sus scrofa
ggcgtcccctggcagagggg

SEQ ID NO: 5645 - DNA, 20 bp, Sus scrofa
cccctggcagaggggcggcc

SEQ ID NO: 5646 - DNA, 20 bp, Sus scrofa
ccctggcagaggggcggccc

SEQ ID NO: 5647 - DNA, 20 bp, Sus scrofa
cctggcagaggggcggcccg

SEQ ID NO: 5648 - DNA, 20 bp, Sus scrofa
gggtggtgagggctttcccc

SEQ ID NO: 5649 - DNA, 20 bp, Sus scrofa
ggggtggtgagggctttccc

SEQ ID NO: 5650 - DNA, 20 bp, Sus scrofa
ggggcgggagggggtggtga

SEQ ID NO: 5651 - DNA, 20 bp, Sus scrofa
aggggcgggagggggtggtg

SEQ ID NO: 5652 - DNA, 20 bp, Sus scrofa
ggcgcaggggcgggaggggg

SEQ ID NO: 5653 - DNA, 20 bp, Sus scrofa
tggggcgcaggggcgggagg

SEQ ID NO: 5654 - DNA, 20 bp, Sus scrofa
gtggggcgcaggggcgggag

SEQ ID NO: 5655 - DNA, 20 bp, Sus scrofa
tgtggggcgcaggggcggga

SEQ ID NO: 5656 - DNA, 20 bp, Sus scrofa
gtgtggggcgcaggggcggg

SEQ ID NO: 5657 - DNA, 20 bp, Sus scrofa
ccagtgtggggcgcaggggc

SEQ ID NO: 5658 - DNA, 20 bp, Sus scrofa
tccagtgtggggcgcagggg

SEQ ID NO: 5659 - DNA, 20 bp, Sus scrofa
gtctccagtgtggggcgcag

SEQ ID NO: 5660 - DNA, 20 bp, Sus scrofa
cgtctccagtgtggggcgca

SEQ ID NO: 5661 - DNA, 20 bp, Sus scrofa
ccgtctccagtgtggggcgc

SEQ ID NO: 5662 - DNA, 20 bp, Sus scrofa
cccgcccctgcgccccacac

SEQ ID NO: 5663 - DNA, 20 bp, Sus scrofa
acgcgcccgtctccagtgtg

SEQ ID NO: 5664 - DNA, 20 bp, Sus scrofa
aacgcgcccgtctccagtgt

SEQ ID NO: 5665 - DNA, 20 bp, Sus scrofa
aaacgcgcccgtctccagtg

SEQ ID NO: 5666 - DNA, 20 bp, Sus scrofa
cctgcgccccacactggaga

SEQ ID NO: 5667 - DNA, 20 bp, Sus scrofa
ctgcgccccacactggagac

SEQ ID NO: 5668 - DNA, 20 bp, Sus scrofa
cactggagacgggcgcgttt

SEQ ID NO: 5669 - DNA, 20 bp, Sus scrofa
actggagacgggcgcgtttc

SEQ ID NO: 5670 - DNA, 20 bp, Sus scrofa
cgggcgcgtttcgggcagtc

SEQ ID NO: 5671 - DNA, 20 bp, Sus scrofa
ttcgggcagtcaggtagcgt

SEQ ID NO: 5672 - DNA, 20 bp, Sus scrofa
tcgggcagtcaggtagcgtt

SEQ ID NO: 5673 - DNA, 20 bp, Sus scrofa
ggtaacaagttgccaacttg

SEQ ID NO: 5674 - DNA, 20 bp, Sus scrofa
gtaacaagttgccaacttgt

SEQ ID NO: 5675 - DNA, 20 bp, Sus scrofa
cttgacgaattcccacaagt

SEQ ID NO: 5676 - DNA, 20 bp, Sus scrofa
cttgtgggaattcgtcaagc

SEQ ID NO: 5677 - DNA, 20 bp, Sus scrofa
ttcgtcaagcaggctttccc

SEQ ID NO: 5678 - DNA, 20 bp, Sus scrofa
ttaaaacccctggcacacca

SEQ ID NO: 5679 - DNA, 20 bp, Sus scrofa
tttaaaacccctggcacacc

SEQ ID NO: 5680 - DNA, 20 bp, Sus scrofa
caggctttccctggtgtgcc

SEQ ID NO: 5681 - DNA, 20 bp, Sus scrofa
aggctttccctggtgtgcca

SEQ ID NO: 5682 - DNA, 20 bp, Sus scrofa
ggctttccctggtgtgccag

SEQ ID NO: 5683 - DNA, 20 bp, Sus scrofa
cctcagagatttaaaacccc

SEQ ID NO: 5684 - DNA, 20 bp, Sus scrofa
ccaggggttttaaatctctg

SEQ ID NO: 5685 - DNA, 20 bp, Sus scrofa
agggccgcacctcatttgtg

SEQ ID NO: 5686 - DNA, 20 bp, Sus scrofa
cagggccgcacctcatttgt

SEQ ID NO: 5687 - DNA, 20 bp, Sus scrofa
ctctgaggtccccacaaatg

SEQ ID NO: 5688 - DNA, 20 bp, Sus scrofa
gcagggccgcacctcatttg

SEQ ID NO: 5689 - DNA, 20 bp, Sus scrofa
aggtccccacaaatgaggtg

SEQ ID NO: 5690 - DNA, 20 bp, Sus scrofa
tgggaacaccagatgcagca

SEQ ID NO: 5691 - DNA, 20 bp, Sus scrofa
gtgggaacaccagatgcagc

SEQ ID NO: 5692 - DNA, 20 bp, Sus scrofa
aggtgcggccctgctgcatc

SEQ ID NO: 5693 - DNA, 20 bp, Sus scrofa
gaggtcttccagggagaggt

SEQ ID NO: 5694 - DNA, 20 bp, Sus scrofa
agaggtcttccagggagagg

SEQ ID NO: 5695 - DNA, 20 bp, Sus scrofa
ctggtgttcccacctctccc

SEQ ID NO: 5696 - DNA, 20 bp, Sus scrofa
accagaggtcttccagggag

SEQ ID NO: 5697 - DNA, 20 bp, Sus scrofa
ccaccaccagaggtcttcca

SEQ ID NO: 5698 - DNA, 20 bp, Sus scrofa
cccaccaccagaggtcttcc

SEQ ID NO: 5699 - DNA, 20 bp, Sus scrofa
acctctccctggaagacctc

SEQ ID NO: 5700 - DNA, 20 bp, Sus scrofa
tctccctggaagacctctgg

SEQ ID NO: 5701 - DNA, 20 bp, Sus scrofa
gtcgagacgcccaccaccag

SEQ ID NO: 5702 - DNA, 20 bp, Sus scrofa
ccctggaagacctctggtgg

SEQ ID NO: 5703 - DNA, 20 bp, Sus scrofa
cctggaagacctctggtggt

SEQ ID NO: 5704 - DNA, 20 bp, Sus scrofa
atctcaaccttaaaactcag

SEQ ID NO: 5705 - DNA, 20 bp, Sus scrofa
aatctcaaccttaaaactca

SEQ ID NO: 5706 - DNA, 20 bp, Sus scrofa
aaatctcaaccttaaaactc

SEQ ID NO: 5707 - DNA, 20 bp, Sus scrofa
actctgtcccctgagtttta

SEQ ID NO: 5708 - DNA, 20 bp, Sus scrofa
ttaaggttgagatttgaccg

SEQ ID NO: 5709 - DNA, 20 bp, Sus scrofa
atggacggaagggacgaccg

SEQ ID NO: 5710 - DNA, 20 bp, Sus scrofa
tgtctgactgatggacggaa

SEQ ID NO: 5711 - DNA, 20 bp, Sus scrofa
atgtctgactgatggacgga

SEQ ID NO: 5712 - DNA, 20 bp, Sus scrofa
caaaatgtctgactgatgga

SEQ ID NO: 5713 - DNA, 20 bp, Sus scrofa
gacacaaaatgtctgactga

SEQ ID NO: 5714 - DNA, 20 bp, Sus scrofa
atcagtcagacattttgtgt

SEQ ID NO: 5715 - DNA, 20 bp, Sus scrofa
aggttcaatgtactagcacg

SEQ ID NO: 5716 - DNA, 20 bp, Sus scrofa
ttcagtgtgaagaggcttaa

SEQ ID NO: 5717 - DNA, 20 bp, Sus scrofa
ttgcaagtttcagtgtgaag

SEQ ID NO: 5718 - DNA, 20 bp, Sus scrofa
tcttaactcttctcaaaatt

SEQ ID NO: 5719 - DNA, 20 bp, Sus scrofa
catttgaattattactgctc

SEQ ID NO: 5720 - DNA, 20 bp, Sus scrofa
ttactgctcaggtccaaatc

SEQ ID NO: 5721 - DNA, 20 bp, Sus scrofa
ttactcacgttcacctgatt

SEQ ID NO: 5722 - DNA, 20 bp, Sus scrofa
atttttctttttggaaactc

SEQ ID NO: 5723 - DNA, 20 bp, Sus scrofa
tatttttctttttggaaact

SEQ ID NO: 5724 - DNA, 20 bp, Sus scrofa
catatacgtatttttctttt

SEQ ID NO: 5725 - DNA, 20 bp, Sus scrofa
caaaaagaaaaatacgtata

SEQ ID NO: 5726 - DNA, 20 bp, Sus scrofa
aatccaaatcccagatctta

SEQ ID NO: 5727 - DNA, 20 bp, Sus scrofa
ctttaaagtgccttaagatc

SEQ ID NO: 5728 - DNA, 20 bp, Sus scrofa
tttaaagtgccttaagatct

SEQ ID NO: 5729 - DNA, 20 bp, Sus scrofa
gtgccttaagatctgggatt

SEQ ID NO: 5730 - DNA, 20 bp, Sus scrofa
tagaacagtattaaaatact

SEQ ID NO: 5731 - DNA, 20 bp, Sus scrofa
agtattaaaatactcggcta

SEQ ID NO: 5732 - DNA, 20 bp, Sus scrofa
gtattaaaatactcggctaa

SEQ ID NO: 5733 - DNA, 20 bp, Sus scrofa
atactcggctaagggctctg

SEQ ID NO: 5734 - DNA, 20 bp, Sus scrofa
cagttgtatttcttctcaga

SEQ ID NO: 5735 - DNA, 20 bp, Sus scrofa
tcagttgtatttcttctcag

SEQ ID NO: 5736 - DNA, 20 bp, Sus scrofa
gagaagaaatacaactgagc

SEQ ID NO: 5737 - DNA, 20 bp, Sus scrofa
aagaaatacaactgagctgg

SEQ ID NO: 5738 - DNA, 20 bp, Sus scrofa
aactgagctggtggtgtata

SEQ ID NO: 5739 - DNA, 20 bp, Sus scrofa
aaatgcatatttatgtgcgt

SEQ ID NO: 5740 - DNA, 20 bp, Sus scrofa
aatgcatatttatgtgcgtt

SEQ ID NO: 5741 - DNA, 20 bp, Sus scrofa
ttcatgggaaaaaaaataaa

SEQ ID NO: 5742 - DNA, 20 bp, Sus scrofa
aaggcttaagttgatttcat

SEQ ID NO: 5743 - DNA, 20 bp, Sus scrofa
taaggcttaagttgatttca

SEQ ID NO: 5744 - DNA, 20 bp, Sus scrofa
actgttttggcaaaagggta

SEQ ID NO: 5745 - DNA, 20 bp, Sus scrofa
taaaaactgttttggcaaaa

SEQ ID NO: 5746 - DNA, 20 bp, Sus scrofa
ctaaaaactgttttggcaaa

SEQ ID NO: 5747 - DNA, 20 bp, Sus scrofa
cacatgactaaaaactgttt

SEQ ID NO: 5748 - DNA, 20 bp, Sus scrofa
caaaacagtttttagtcatg

SEQ ID NO: 5749 - DNA, 20 bp, Sus scrofa
atgtggctttttaaattaaa

SEQ ID NO: 5750 - DNA, 20 bp, Sus scrofa
tgaaatgtgaatagtgcaac

SEQ ID NO: 5751 - DNA, 20 bp, Sus scrofa
acagcagcccctaatcattt

SEQ ID NO: 5752 - DNA, 20 bp, Sus scrofa
tacagcagcccctaatcatt

SEQ ID NO: 5753 - DNA, 20 bp, Sus scrofa
ctcagaagtcccaaatgatt

SEQ ID NO: 5754 - DNA, 20 bp, Sus scrofa
tcagaagtcccaaatgatta

SEQ ID NO: 5755 - DNA, 20 bp, Sus scrofa
cagaagtcccaaatgattag

SEQ ID NO: 5756 - DNA, 20 bp, Sus scrofa
atgattaggggctgctgtat

SEQ ID NO: 5757 - DNA, 20 bp, Sus scrofa
actgctctacagtaattcac

SEQ ID NO: 5758 - DNA, 20 bp, Sus scrofa
tccaggccctggcatgctgt

SEQ ID NO: 5759 - DNA, 20 bp, Sus scrofa
atatttgccaacagcatgcc

SEQ ID NO: 5760 - DNA, 20 bp, Sus scrofa
tatttgccaacagcatgcca

SEQ ID NO: 5761 - DNA, 20 bp, Sus scrofa
gccaacagcatgccagggcc

SEQ ID NO: 5762 - DNA, 20 bp, Sus scrofa
ctcactgtttttccaggccc

SEQ ID NO: 5763 - DNA, 20 bp, Sus scrofa
ctctgcctcactgtttttcc

SEQ ID NO: 5764 - DNA, 20 bp, Sus scrofa
cagggcctggaaaaacagtg

SEQ ID NO: 5765 - DNA, 20 bp, Sus scrofa
ctgaggcttcagaatggaag

SEQ ID NO: 5766 - DNA, 20 bp, Sus scrofa
actgaggcttcagaatggaa

SEQ ID NO: 5767 - DNA, 20 bp, Sus scrofa
tactgaggcttcagaatgga

SEQ ID NO: 5768 - DNA, 20 bp, Sus scrofa
cggttactgaggcttcagaa

SEQ ID NO: 5769 - DNA, 20 bp, Sus scrofa
acaggcaccaccggttactg

SEQ ID NO: 5770 - DNA, 20 bp, Sus scrofa
cattctgaagcctcagtaac

SEQ ID NO: 5771 - DNA, 20 bp, Sus scrofa
tctgaagcctcagtaaccgg

SEQ ID NO: 5772 - DNA, 20 bp, Sus scrofa
acctaggcaacaggcaccac

SEQ ID NO: 5773 - DNA, 20 bp, Sus scrofa
ctaacttgcacctaggcaac

SEQ ID NO: 5774 - DNA, 20 bp, Sus scrofa
accggtggtgcctgttgcct

SEQ ID NO: 5775 - DNA, 20 bp, Sus scrofa
aaggcccctaacttgcacct

SEQ ID NO: 5776 - DNA, 20 bp, Sus scrofa
ctgttgcctaggtgcaagtt

SEQ ID NO: 5777 - DNA, 20 bp, Sus scrofa
tgttgcctaggtgcaagtta

SEQ ID NO: 5778 - DNA, 20 bp, Sus scrofa
gttgcctaggtgcaagttag

SEQ ID NO: 5779 - DNA, 20 bp, Sus scrofa
taggtgcaagttaggggcct

SEQ ID NO: 5780 - DNA, 20 bp, Sus scrofa
aggtgcaagttaggggcctt

SEQ ID NO: 5781 - DNA, 20 bp, Sus scrofa
gctcctatgacactctccca

SEQ ID NO: 5782 - DNA, 20 bp, Sus scrofa
gggccttgggagagtgtcat

SEQ ID NO: 5783 - DNA, 20 bp, Sus scrofa
tttgcccccacaatcttggc

SEQ ID NO: 5784 - DNA, 20 bp, Sus scrofa
ataggagccagccaagattg

SEQ ID NO: 5785 - DNA, 20 bp, Sus scrofa
accctttgcccccacaatct

SEQ ID NO: 5786 - DNA, 20 bp, Sus scrofa
taggagccagccaagattgt

SEQ ID NO: 5787 - DNA, 20 bp, Sus scrofa
aggagccagccaagattgtg

SEQ ID NO: 5788 - DNA, 20 bp, Sus scrofa
ggagccagccaagattgtgg

SEQ ID NO: 5789 - DNA, 20 bp, Sus scrofa
agccaagattgtgggggcaa

SEQ ID NO: 5790 - DNA, 20 bp, Sus scrofa
gccaagattgtgggggcaaa

SEQ ID NO: 5791 - DNA, 20 bp, Sus scrofa
gtgggggcaaagggtcccct

SEQ ID NO: 5792 - DNA, 20 bp, Sus scrofa
tgggggcaaagggtccccta

SEQ ID NO: 5793 - DNA, 20 bp, Sus scrofa
ctccctgttacagtccctag

SEQ ID NO: 5794 - DNA, 20 bp, Sus scrofa
tctccctgttacagtcccta

SEQ ID NO: 5795 - DNA, 20 bp, Sus scrofa
gtctccctgttacagtccct

SEQ ID NO: 5796 - DNA, 20 bp, Sus scrofa
ggtcccctagggactgtaac

SEQ ID NO: 5797 - DNA, 20 bp, Sus scrofa
gtcccctagggactgtaaca

SEQ ID NO: 5798 - DNA, 20 bp, Sus scrofa
gagactgaaaacagtaagag

SEQ ID NO: 5799 - DNA, 20 bp, Sus scrofa
aaacagtaagagaggttctt

SEQ ID NO: 5800 - DNA, 20 bp, Sus scrofa
gtaagagaggttcttaggag

SEQ ID NO: 5801 - DNA, 20 bp, Sus scrofa
ccccaatcagttgaaggtca

SEQ ID NO: 5802 - DNA, 20 bp, Sus scrofa
acccccccccaatcagttga

SEQ ID NO: 5803 - DNA, 20 bp, Sus scrofa
agccttgaccttcaactgat

SEQ ID NO: 5804 - DNA, 20 bp, Sus scrofa
gccttgaccttcaactgatt

SEQ ID NO: 5805 - DNA, 20 bp, Sus scrofa
ccttgaccttcaactgattg

SEQ ID NO: 5806 - DNA, 20 bp, Sus scrofa
cttgaccttcaactgattgg

SEQ ID NO: 5807 - DNA, 20 bp, Sus scrofa
ttgaccttcaactgattggg

SEQ ID NO: 5808 - DNA, 20 bp, Sus scrofa
tgaccttcaactgattgggg

SEQ ID NO: 5809 - DNA, 20 bp, Sus scrofa
gaccttcaactgattggggg

SEQ ID NO: 5810 - DNA, 20 bp, Sus scrofa
accttcaactgattgggggg

SEQ ID NO: 5811 - DNA, 20 bp, Sus scrofa
tgattgggggggggtgctgt

SEQ ID NO: 5812 - DNA, 20 bp, Sus scrofa
ggggggtgctgtaggtttaa

SEQ ID NO: 5813 - DNA, 20 bp, Sus scrofa
cacaggagctgctcaagaaa

SEQ ID NO: 5814 - DNA, 20 bp, Sus scrofa
catttcttgagcagctcctg

SEQ ID NO: 5815 - DNA, 20 bp, Sus scrofa
tgggaacctccatatgccac

SEQ ID NO: 5816 - DNA, 20 bp, Sus scrofa
tgagcagctcctgtggcata

SEQ ID NO: 5817 - DNA, 20 bp, Sus scrofa
gcagctcctgtggcatatgg

SEQ ID NO: 5818 - DNA, 20 bp, Sus scrofa
tgtggcatatggaggttccc

SEQ ID NO: 5819 - DNA, 20 bp, Sus scrofa
catatggaggttcccaggct

SEQ ID NO: 5820 - DNA, 20 bp, Sus scrofa
atatggaggttcccaggcta

SEQ ID NO: 5821 - DNA, 20 bp, Sus scrofa
tccgattcgacccctagcct

SEQ ID NO: 5822 - DNA, 20 bp, Sus scrofa
tatggaggttcccaggctag

SEQ ID NO: 5823 - DNA, 20 bp, Sus scrofa
ctccgattcgacccctagcc

SEQ ID NO: 5824 - DNA, 20 bp, Sus scrofa
tcccaggctaggggtcgaat

SEQ ID NO: 5825 - DNA, 20 bp, Sus scrofa
cgaatcggagctgtagccac

SEQ ID NO: 5826 - DNA, 20 bp, Sus scrofa
gtggctctggcgtaggccgg

SEQ ID NO: 5827 - DNA, 20 bp, Sus scrofa
gctgtggctctggcgtaggc

SEQ ID NO: 5828 - DNA, 20 bp, Sus scrofa
cgttgctgtggctctggcgt

SEQ ID NO: 5829 - DNA, 20 bp, Sus scrofa
atcccacgttgctgtggctc

SEQ ID NO: 5830 - DNA, 20 bp, Sus scrofa
gctcggatcccacgttgctg

SEQ ID NO: 5831 - DNA, 20 bp, Sus scrofa
acgccagagccacagcaacg

SEQ ID NO: 5832 - DNA, 20 bp, Sus scrofa
cgccagagccacagcaacgt

SEQ ID NO: 5833 - DNA, 20 bp, Sus scrofa
tgtaggttgcagacgcggct

SEQ ID NO: 5834 - DNA, 20 bp, Sus scrofa
tgtggtgtaggttgcagacg

SEQ ID NO: 5835 - DNA, 20 bp, Sus scrofa
gttgccatgagctgtggtgt

SEQ ID NO: 5836 - DNA, 20 bp, Sus scrofa
tccggcgttgccatgagctg

SEQ ID NO: 5837 - DNA, 20 bp, Sus scrofa
gcaacctacaccacagctca

SEQ ID NO: 5838 - DNA, 20 bp, Sus scrofa
accacagctcatggcaacgc

SEQ ID NO: 5839 - DNA, 20 bp, Sus scrofa
tgctcagtgggttaacgatc

SEQ ID NO: 5840 - DNA, 20 bp, Sus scrofa
ggtccctgcacttgctcagt

SEQ ID NO: 5841 - DNA, 20 bp, Sus scrofa
cggtccctgcacttgctcag

SEQ ID NO: 5842 - DNA, 20 bp, Sus scrofa
ttaacccactgagcaagtgc

SEQ ID NO: 5843 - DNA, 20 bp, Sus scrofa
taacccactgagcaagtgca

SEQ ID NO: 5844 - DNA, 20 bp, Sus scrofa
gaaccatgaggtttcgggtt

SEQ ID NO: 5845 - DNA, 20 bp, Sus scrofa
actaggaaccatgaggtttc

SEQ ID NO: 5846 - DNA, 20 bp, Sus scrofa
gactaggaaccatgaggttt

SEQ ID NO: 5847 - DNA, 20 bp, Sus scrofa
ggaccgaacccgaaacctca

SEQ ID NO: 5848 - DNA, 20 bp, Sus scrofa
gaacctgactaggaaccatg

SEQ ID NO: 5849 - DNA, 20 bp, Sus scrofa
aaacctcatggttcctagtc

SEQ ID NO: 5850 - DNA, 20 bp, Sus scrofa
agtggttaacgaacctgact

SEQ ID NO: 5851 - DNA, 20 bp, Sus scrofa
gagttcccgtcgtggcgcag

SEQ ID NO: 5852 - DNA, 20 bp, Sus scrofa
cgttaaccactgcgccacga

SEQ ID NO: 5853 - DNA, 20 bp, Sus scrofa
gttaaccactgcgccacgac

SEQ ID NO: 5854 - DNA, 20 bp, Sus scrofa
ttaaaccggagttcccgtcg

SEQ ID NO: 5855 - DNA, 20 bp, Sus scrofa
ctgcgccacgacgggaactc

SEQ ID NO: 5856 - DNA, 20 bp, Sus scrofa
cgacgggaactccggtttaa

SEQ ID NO: 5857 - DNA, 20 bp, Sus scrofa
ttttaaaatttcctttaaac

SEQ ID NO: 5858 - DNA, 20 bp, Sus scrofa
gcacaaaagcatcatcttta

SEQ ID NO: 5859 - DNA, 20 bp, Sus scrofa
tcatctttaaggtaagtgag

SEQ ID NO: 5860 - DNA, 20 bp, Sus scrofa
ttgctgacttagaatcatct

SEQ ID NO: 5861 - DNA, 20 bp, Sus scrofa
ttctaagtcagcaagtctta

SEQ ID NO: 5862 - DNA, 20 bp, Sus scrofa
tctaagtcagcaagtcttat

SEQ ID NO: 5863 - DNA, 20 bp, Sus scrofa
caagtcttatgggtttgttg

SEQ ID NO: 5864 - DNA, 20 bp, Sus scrofa
ggtttgttgtggcgcgagac

SEQ ID NO: 5865 - DNA, 20 bp, Sus scrofa
gtttgttgtggcgcgagact

SEQ ID NO: 5866 - DNA, 20 bp, Sus scrofa
tttgttgtggcgcgagactg

SEQ ID NO: 5867 - DNA, 20 bp, Sus scrofa
tgtggcgcgagactggggaa

SEQ ID NO: 5868 - DNA, 20 bp, Sus scrofa
gtggcgcgagactggggaaa

SEQ ID NO: 5869 - DNA, 20 bp, Sus scrofa
tggcgcgagactggggaaag

SEQ ID NO: 5870 - DNA, 20 bp, Sus scrofa
caatacattcaatggagaga

SEQ ID NO: 5871 - DNA, 20 bp, Sus scrofa
ccaatacattcaatggagag

SEQ ID NO: 5872 - DNA, 20 bp, Sus scrofa
tgttataccaatacattcaa

SEQ ID NO: 5873 - DNA, 20 bp, Sus scrofa
cctctctccattgaatgtat

SEQ ID NO: 5874 - DNA, 20 bp, Sus scrofa
ctattccacttgatgacatc

SEQ ID NO: 5875 - DNA, 20 bp, Sus scrofa
gtattccagatgtcatcaag

SEQ ID NO: 5876 - DNA, 20 bp, Sus scrofa
gaagactacttgagagtaag

SEQ ID NO: 5877 - DNA, 20 bp, Sus scrofa
gactacttgagagtaagtgg

SEQ ID NO: 5878 - DNA, 20 bp, Sus scrofa
taaatgttttaagaccagat

SEQ ID NO: 5879 - DNA, 20 bp, Sus scrofa
gccatactcaaaagcctatc

SEQ ID NO: 5880 - DNA, 20 bp, Sus scrofa
accagataggcttttgagta

SEQ ID NO: 5881 - DNA, 20 bp, Sus scrofa
ttttttaatttttttatttg

SEQ ID NO: 5882 - DNA, 20 bp, Sus scrofa
tttttaatttttttatttgg

SEQ ID NO: 5883 - DNA, 20 bp, Sus scrofa
tgggggtttgaagaagaccc

SEQ ID NO: 5884 - DNA, 20 bp, Sus scrofa
tacaaggtaaactgttacca

SEQ ID NO: 5885 - DNA, 20 bp, Sus scrofa
ttacaaggtaaactgttacc

SEQ ID NO: 5886 - DNA, 20 bp, Sus scrofa
aaaggtgttttggacttaca

SEQ ID NO: 5887 - DNA, 20 bp, Sus scrofa
cttctgatataaaggtgttt

SEQ ID NO: 5888 - DNA, 20 bp, Sus scrofa
aaaagacacttctgatataa

SEQ ID NO: 5889 - DNA, 20 bp, Sus scrofa
tcagaagtgtcttttcatag

SEQ ID NO: 5890 - DNA, 20 bp, Sus scrofa
tcttttcatagtggaaaaag

SEQ ID NO: 5891 - DNA, 20 bp, Sus scrofa
gtggaaaaagtggcttaaga

SEQ ID NO: 5892 - DNA, 20 bp, Sus scrofa
tgacccccttgctgtacagt

SEQ ID NO: 5893 - DNA, 20 bp, Sus scrofa
ctgacccccttgctgtacag

SEQ ID NO: 5894 - DNA, 20 bp, Sus scrofa
tattttcccactgtacagca

SEQ ID NO: 5895 - DNA, 20 bp, Sus scrofa
attttcccactgtacagcaa

SEQ ID NO: 5896 - DNA, 20 bp, Sus scrofa
ttttcccactgtacagcaag

SEQ ID NO: 5897 - DNA, 20 bp, Sus scrofa
tttcccactgtacagcaagg

SEQ ID NO: 5898 - DNA, 20 bp, Sus scrofa
cactgtacagcaagggggtc

SEQ ID NO: 5899 - DNA, 20 bp, Sus scrofa
aattgtaatctatacatgta

SEQ ID NO: 5900 - DNA, 20 bp, Sus scrofa
tgttaaaatgccatcttagg

SEQ ID NO: 5901 - DNA, 20 bp, Sus scrofa
tacagtttttccccctaaga

SEQ ID NO: 5902 - DNA, 20 bp, Sus scrofa
atgttaaaatgccatcttag

SEQ ID NO: 5903 - DNA, 20 bp, Sus scrofa
tatgttaaaatgccatctta

SEQ ID NO: 5904 - DNA, 20 bp, Sus scrofa
atatgttaaaatgccatctt

SEQ ID NO: 5905 - DNA, 20 bp, Sus scrofa
ataatgatcagtgaaaatat

SEQ ID NO: 5906 - DNA, 20 bp, Sus scrofa
gatcagtgaaaatataggca

SEQ ID NO: 5907 - DNA, 20 bp, Sus scrofa
gtgaaaatataggcaaggag

SEQ ID NO: 5908 - DNA, 20 bp, Sus scrofa
caatatcagtggtacttttc

SEQ ID NO: 5909 - DNA, 20 bp, Sus scrofa
aatatgtgaatcaatatcag

SEQ ID NO: 5910 - DNA, 20 bp, Sus scrofa
actgatattgattcacatat

SEQ ID NO: 5911 - DNA, 20 bp, Sus scrofa
gatattgattcacatattgg

SEQ ID NO: 5912 - DNA, 20 bp, Sus scrofa
attgattcacatattggtgg

SEQ ID NO: 5913 - DNA, 20 bp, Sus scrofa
ttatggaatatatctaaatt

SEQ ID NO: 5914 - DNA, 20 bp, Sus scrofa
atttagatatattccataat

SEQ ID NO: 5915 - DNA, 20 bp, Sus scrofa
acaggtgttttttccaatta

SEQ ID NO: 5916 - DNA, 20 bp, Sus scrofa
gagggcctcatataatgaac

SEQ ID NO: 5917 - DNA, 20 bp, Sus scrofa
aaacacctgttcattatatg

SEQ ID NO: 5918 - DNA, 20 bp, Sus scrofa
ttggaaaaatagaaagatga

SEQ ID NO: 5919 - DNA, 20 bp, Sus scrofa
tttggaaaaatagaaagatg

SEQ ID NO: 5920 - DNA, 20 bp, Sus scrofa
ctttctatttttccaaaaca

SEQ ID NO: 5921 - DNA, 20 bp, Sus scrofa
ttaataacagtgccatgttt

SEQ ID NO: 5922 - DNA, 20 bp, Sus scrofa
catggcactgttattaacta

SEQ ID NO: 5923 - DNA, 20 bp, Sus scrofa
actgttattaactatggatc

SEQ ID NO: 5924 - DNA, 20 bp, Sus scrofa
ctgttattaactatggatct

SEQ ID NO: 5925 - DNA, 20 bp, Sus scrofa
tcctttgaacataagactga

SEQ ID NO: 5926 - DNA, 20 bp, Sus scrofa
tccttcagtcttatgttcaa

SEQ ID NO: 5927 - DNA, 20 bp, Sus scrofa
tacaagccacaggaactgca

SEQ ID NO: 5928 - DNA, 20 bp, Sus scrofa
agaaagccatgcagttcctg

SEQ ID NO: 5929 - DNA, 20 bp, Sus scrofa
gggcatagattacaagccac

SEQ ID NO: 5930 - DNA, 20 bp, Sus scrofa
aagcatacagtgtttcacag

SEQ ID NO: 5931 - DNA, 20 bp, Sus scrofa
caagcatacagtgtttcaca

SEQ ID NO: 5932 - DNA, 20 bp, Sus scrofa
tcaagcatacagtgtttcac

SEQ ID NO: 5933 - DNA, 20 bp, Sus scrofa
ggagaaaaactattatttgt

SEQ ID NO: 5934 - DNA, 20 bp, Sus scrofa
aggagaaaaactattatttg

SEQ ID NO: 5935 - DNA, 20 bp, Sus scrofa
caaataatagtttttctcct

SEQ ID NO: 5936 - DNA, 20 bp, Sus scrofa
ttctccagtaaattgggcct

SEQ ID NO: 5937 - DNA, 20 bp, Sus scrofa
ccttaattctccagtaaatt

SEQ ID NO: 5938 - DNA, 20 bp, Sus scrofa
ttctcctaggcccaatttac

SEQ ID NO: 5939 - DNA, 20 bp, Sus scrofa
cccttaattctccagtaaat

SEQ ID NO: 5940 - DNA, 20 bp, Sus scrofa
cccaatttactggagaatta

SEQ ID NO: 5941 - DNA, 20 bp, Sus scrofa
ccaatttactggagaattaa

SEQ ID NO: 5942 - DNA, 20 bp, Sus scrofa
taagggttttcttacattac

SEQ ID NO: 5943 - DNA, 20 bp, Sus scrofa
atgccaaaagtgggggagtg

SEQ ID NO: 5944 - DNA, 20 bp, Sus scrofa
aatgccaaaagtgggggagt

SEQ ID NO: 5945 - DNA, 20 bp, Sus scrofa
aaatgccaaaagtgggggag

SEQ ID NO: 5946 - DNA, 20 bp, Sus scrofa
acaataaatgccaaaagtgg

SEQ ID NO: 5947 - DNA, 20 bp, Sus scrofa
aatccccactcccccacttt

SEQ ID NO: 5948 - DNA, 20 bp, Sus scrofa
aacaataaatgccaaaagtg

SEQ ID NO: 5949 - DNA, 20 bp, Sus scrofa
caacaataaatgccaaaagt

SEQ ID NO: 5950 - DNA, 20 bp, Sus scrofa
acaacaataaatgccaaaag

SEQ ID NO: 5951 - DNA, 20 bp, Sus scrofa
tgttgtgattttgagctcaa

SEQ ID NO: 5952 - DNA, 20 bp, Sus scrofa
gttgtgattttgagctcaat

SEQ ID NO: 5953 - DNA, 20 bp, Sus scrofa
gctcaatgggatattctaat

SEQ ID NO: 5954 - DNA, 20 bp, Sus scrofa
tggttgcaatagccgctaat

SEQ ID NO: 5955 - DNA, 20 bp, Sus scrofa
ggttgcaatagccgctaatt

SEQ ID NO: 5956 - DNA, 20 bp, Sus scrofa
aaggaaataaccccaattag

SEQ ID NO: 5957 - DNA, 20 bp, Sus scrofa
gttgcaatagccgctaattg

SEQ ID NO: 5958 - DNA, 20 bp, Sus scrofa
gaagaggcactacttacata

SEQ ID NO: 5959 - DNA, 20 bp, Sus scrofa
ctaatttatcctcaatgaag

SEQ ID NO: 5960 - DNA, 20 bp, Sus scrofa
taagtagtgcctcttcattg

SEQ ID NO: 5961 - DNA, 20 bp, Sus scrofa
tgggtgtgtgtgagattttc

SEQ ID NO: 5962 - DNA, 20 bp, Sus scrofa
gaatatctacatggtaggat

SEQ ID NO: 5963 - DNA, 20 bp, Sus scrofa
agaatatctacatggtagga

SEQ ID NO: 5964 - DNA, 20 bp, Sus scrofa
caccagaatatctacatggt

SEQ ID NO: 5965 - DNA, 20 bp, Sus scrofa
tctacaccagaatatctaca

SEQ ID NO: 5966 - DNA, 20 bp, Sus scrofa
atcctaccatgtagatattc

SEQ ID NO: 5967 - DNA, 20 bp, Sus scrofa
gaaaaaattaaacattctcg

SEQ ID NO: 5968 - DNA, 20 bp, Sus scrofa
ttaacagtataatttgagtt

SEQ ID NO: 5969 - DNA, 20 bp, Sus scrofa
gtaaacatctttatcttcta

SEQ ID NO: 5970 - DNA, 20 bp, Sus scrofa
ttctggtcacttaatgtgaa

SEQ ID NO: 5971 - DNA, 20 bp, Sus scrofa
attcacattaagtgaccaga

SEQ ID NO: 5972 - DNA, 20 bp, Sus scrofa
taaaaaagcaaaaatccttc

SEQ ID NO: 5973 - DNA, 20 bp, Sus scrofa
gaacatttctacctatcagt

SEQ ID NO: 5974 - DNA, 20 bp, Sus scrofa
aacacccatatcctactgat

SEQ ID NO: 5975 - DNA, 20 bp, Sus scrofa
ttctacctatcagtaggata

SEQ ID NO: 5976 - DNA, 20 bp, Sus scrofa
tctacctatcagtaggatat

SEQ ID NO: 5977 - DNA, 20 bp, Sus scrofa
tgtttgggtgtcatgaagga

SEQ ID NO: 5978 - DNA, 20 bp, Sus scrofa
aatgtgtttgggtgtcatga

SEQ ID NO: 5979 - DNA, 20 bp, Sus scrofa
agtagttctcaaatgtgttt

SEQ ID NO: 5980 - DNA, 20 bp, Sus scrofa
tagtagttctcaaatgtgtt

SEQ ID NO: 5981 - DNA, 20 bp, Sus scrofa
cgtacttttaaaataatagt

SEQ ID NO: 5982 - DNA, 20 bp, Sus scrofa
gtacttttaaaataatagta

SEQ ID NO: 5983 - DNA, 20 bp, Sus scrofa
cttttaaaataatagtaggg

SEQ ID NO: 5984 - DNA, 20 bp, Sus scrofa
agggtggaagagtttaagat

SEQ ID NO: 5985 - DNA, 20 bp, Sus scrofa
ttaagattggttaactcatg

SEQ ID NO: 5986 - DNA, 20 bp, Sus scrofa
gattggttaactcatgaggc

SEQ ID NO: 5987 - DNA, 20 bp, Sus scrofa
atgaggctggaaattgtcaa

SEQ ID NO: 5988 - DNA, 20 bp, Sus scrofa
aggctggaaattgtcaaagg

SEQ ID NO: 5989 - DNA, 20 bp, Sus scrofa
tggaaattgtcaaaggtggc

SEQ ID NO: 5990 - DNA, 20 bp, Sus scrofa
aacaaaaaaaaacaaaaatg

SEQ ID NO: 5991 - DNA, 20 bp, Sus scrofa
ttttgtctttttgtctttct

SEQ ID NO: 5992 - DNA, 20 bp, Sus scrofa
tttgtctttttgtctttcta

SEQ ID NO: 5993 - DNA, 20 bp, Sus scrofa
tctttctagggccacacccg

SEQ ID NO: 5994 - DNA, 20 bp, Sus scrofa
acctacatatgcctcgggtg

SEQ ID NO: 5995 - DNA, 20 bp, Sus scrofa
tgggaacctacatatgcctc

SEQ ID NO: 5996 - DNA, 20 bp, Sus scrofa
ctgggaacctacatatgcct

SEQ ID NO: 5997 - DNA, 20 bp, Sus scrofa
gccacacccgaggcatatgt

SEQ ID NO: 5998 - DNA, 20 bp, Sus scrofa
cgaggcatatgtaggttccc

SEQ ID NO: 5999 - DNA, 20 bp, Sus scrofa
atatgtaggttcccaggcta

SEQ ID NO: 6000 - DNA, 20 bp, Sus scrofa
ccagattggacccttagcct

SEQ ID NO: 6001 - DNA, 20 bp, Sus scrofa
tatgtaggttcccaggctaa

SEQ ID NO: 6002 - DNA, 20 bp, Sus scrofa
tccagattggacccttagcc

SEQ ID NO: 6003 - DNA, 20 bp, Sus scrofa
cccaggctaagggtccaatc

SEQ ID NO: 6004 - DNA, 20 bp, Sus scrofa
cagcggctacagctccagat

SEQ ID NO: 6005 - DNA, 20 bp, Sus scrofa
caatctggagctgtagccgc

SEQ ID NO: 6006 - DNA, 20 bp, Sus scrofa
atgcctatggcgcaggccag

SEQ ID NO: 6007 - DNA, 20 bp, Sus scrofa
catggctatgcctatggcgc

SEQ ID NO: 6008 - DNA, 20 bp, Sus scrofa
tagccgctggcctgcgccat

SEQ ID NO: 6009 - DNA, 20 bp, Sus scrofa
atctggcatggctatgccta

SEQ ID NO: 6010 - DNA, 20 bp, Sus scrofa
gatgtgactcagatctggca

SEQ ID NO: 6011 - DNA, 20 bp, Sus scrofa
tcacagatgtgactcagatc

SEQ ID NO: 6012 - DNA, 20 bp, Sus scrofa
gttactgtgagctgtggtgt

SEQ ID NO: 6013 - DNA, 20 bp, Sus scrofa
tccagcgttactgtgagctg

SEQ ID NO: 6014 - DNA, 20 bp, Sus scrofa
accacagctcacagtaacgc

SEQ ID NO: 6015 - DNA, 20 bp, Sus scrofa
tggccttgctcagtggctta

SEQ ID NO: 6016 - DNA, 20 bp, Sus scrofa
caatccctggccttgctcag

SEQ ID NO: 6017 - DNA, 20 bp, Sus scrofa
gatccttaagccactgagca

SEQ ID NO: 6018 - DNA, 20 bp, Sus scrofa
ttaagccactgagcaaggcc

SEQ ID NO: 6019 - DNA, 20 bp, Sus scrofa
taagccactgagcaaggcca

SEQ ID NO: 6020 - DNA, 20 bp, Sus scrofa
gaggttgtgggttcaatccc

SEQ ID NO: 6021 - DNA, 20 bp, Sus scrofa
aataggaaccatgaggttgt

SEQ ID NO: 6022 - DNA, 20 bp, Sus scrofa
gaataggaaccatgaggttg

SEQ ID NO: 6023 - DNA, 20 bp, Sus scrofa
ggattgaacccacaacctca

SEQ ID NO: 6024 - DNA, 20 bp, Sus scrofa
gaatccgaataggaaccatg

SEQ ID NO: 6025 - DNA, 20 bp, Sus scrofa
acaacctcatggttcctatt

SEQ ID NO: 6026 - DNA, 20 bp, Sus scrofa
cagcagaaatgaatccgaat

SEQ ID NO: 6027 - DNA, 20 bp, Sus scrofa
catttctgctgcaccatgac

SEQ ID NO: 6028 - DNA, 20 bp, Sus scrofa
ggaaagtggaactcctgtca

SEQ ID NO: 6029 - DNA, 20 bp, Sus scrofa
taatccaataatgtggaaag

SEQ ID NO: 6030 - DNA, 20 bp, Sus scrofa
agttccactttccacattat

SEQ ID NO: 6031 - DNA, 20 bp, Sus scrofa
agtgaaataatccaataatg

SEQ ID NO: 6032 - DNA, 20 bp, Sus scrofa
aaaaagatatggaggcgtaa

SEQ ID NO: 6033 - DNA, 20 bp, Sus scrofa
agagggaaaaaaagatatgg

SEQ ID NO: 6034 - DNA, 20 bp, Sus scrofa
ataagagggaaaaaaagata

SEQ ID NO: 6035 - DNA, 20 bp, Sus scrofa
agttataatttgttataaga

SEQ ID NO: 6036 - DNA, 20 bp, Sus scrofa
cagttataatttgttataag

SEQ ID NO: 6037 - DNA, 20 bp, Sus scrofa
aacaaattataactgataaa

SEQ ID NO: 6038 - DNA, 20 bp, Sus scrofa
acaaattataactgataaat

SEQ ID NO: 6039 - DNA, 20 bp, Sus scrofa
caaattataactgataaatg

SEQ ID NO: 6040 - DNA, 20 bp, Sus scrofa
ttataactgataaatgggga

SEQ ID NO: 6041 - DNA, 20 bp, Sus scrofa
atggggaaggtcactcaagc

SEQ ID NO: 6042 - DNA, 20 bp, Sus scrofa
ggaaggtcactcaagcaggt

SEQ ID NO: 6043 - DNA, 20 bp, Sus scrofa
gaaggtcactcaagcaggta

SEQ ID NO: 6044 - DNA, 20 bp, Sus scrofa
tattcccctagttagtctag

SEQ ID NO: 6045 - DNA, 20 bp, Sus scrofa
ctattcccctagttagtcta

SEQ ID NO: 6046 - DNA, 20 bp, Sus scrofa
cctattcccctagttagtct

SEQ ID NO: 6047 - DNA, 20 bp, Sus scrofa
ttttttcccctagactaact

SEQ ID NO: 6048 - DNA, 20 bp, Sus scrofa
tttttcccctagactaacta

SEQ ID NO: 6049 - DNA, 20 bp, Sus scrofa
ttttcccctagactaactag

SEQ ID NO: 6050 - DNA, 20 bp, Sus scrofa
cctagactaactaggggaat

SEQ ID NO: 6051 - DNA, 20 bp, Sus scrofa
aataggaaatgagagcatat

SEQ ID NO: 6052 - DNA, 20 bp, Sus scrofa
gaaatgagagcatattggag

SEQ ID NO: 6053 - DNA, 20 bp, Sus scrofa
gaaaatttcttgatctcctg

SEQ ID NO: 6054 - DNA, 20 bp, Sus scrofa
ggattggagctagtagccgc

SEQ ID NO: 6055 - DNA, 20 bp, Sus scrofa
tgtagccaagttacggggat

SEQ ID NO: 6056 - DNA, 20 bp, Sus scrofa
tttactgtagccaagttacg

SEQ ID NO: 6057 - DNA, 20 bp, Sus scrofa
tagctccaatccccgtaact

SEQ ID NO: 6058 - DNA, 20 bp, Sus scrofa
atttactgtagccaagttac

SEQ ID NO: 6059 - DNA, 20 bp, Sus scrofa
aatttactgtagccaagtta

SEQ ID NO: 6060 - DNA, 20 bp, Sus scrofa
gagtgcatcagctttgctga

SEQ ID NO: 6061 - DNA, 20 bp, Sus scrofa
gctatagaaaacaaaaaaat

SEQ ID NO: 6062 - DNA, 20 bp, Sus scrofa
agaaaacaaaaaaattggat

SEQ ID NO: 6063 - DNA, 20 bp, Sus scrofa
aaattggataggaaatgttt

SEQ ID NO: 6064 - DNA, 20 bp, Sus scrofa
tgacaaaaagctagtttagt

SEQ ID NO: 6065 - DNA, 20 bp, Sus scrofa
gacaaaaagctagtttagtt

SEQ ID NO: 6066 - DNA, 20 bp, Sus scrofa
agctagtttagttgggaaaa

SEQ ID NO: 6067 - DNA, 20 bp, Sus scrofa
gctagtttagttgggaaaac

SEQ ID NO: 6068 - DNA, 20 bp, Sus scrofa
ctagtttagttgggaaaacg

SEQ ID NO: 6069 - DNA, 20 bp, Sus scrofa
tagtttagttgggaaaacgg

SEQ ID NO: 6070 - DNA, 20 bp, Sus scrofa
gggatcaagaagagtaaatt

SEQ ID NO: 6071 - DNA, 20 bp, Sus scrofa
actggatagactaatactgg

SEQ ID NO: 6072 - DNA, 20 bp, Sus scrofa
aactggatagactaatactg

SEQ ID NO: 6073 - DNA, 20 bp, Sus scrofa
taactggatagactaatact

SEQ ID NO: 6074 - DNA, 20 bp, Sus scrofa
gtaactggatagactaatac

SEQ ID NO: 6075 - DNA, 20 bp, Sus scrofa
atttgatccaaagtagtaac

SEQ ID NO: 6076 - DNA, 20 bp, Sus scrofa
agtctatccagttactactt

SEQ ID NO: 6077 - DNA, 20 bp, Sus scrofa
ctatttgtgcattcaactta

SEQ ID NO: 6078 - DNA, 20 bp, Sus scrofa
tctatttgtgcattcaactt

SEQ ID NO: 6079 - DNA, 20 bp, Sus scrofa
gtaatactggaaggttgggc

SEQ ID NO: 6080 - DNA, 20 bp, Sus scrofa
ccatgtaatactggaaggtt

SEQ ID NO: 6081 - DNA, 20 bp, Sus scrofa
accatgtaatactggaaggt

SEQ ID NO: 6082 - DNA, 20 bp, Sus scrofa
ggctaccatgtaatactgga

SEQ ID NO: 6083 - DNA, 20 bp, Sus scrofa
tcaaggctaccatgtaatac

SEQ ID NO: 6084 - DNA, 20 bp, Sus scrofa
cccaaccttccagtattaca

SEQ ID NO: 6085 - DNA, 20 bp, Sus scrofa
tattacatggtagccttgag

SEQ ID NO: 6086 - DNA, 20 bp, Sus scrofa
tcatgtcccaaatcctctca

SEQ ID NO: 6087 - DNA, 20 bp, Sus scrofa
atggtagccttgagaggatt

SEQ ID NO: 6088 - DNA, 20 bp, Sus scrofa
tggtagccttgagaggattt

SEQ ID NO: 6089 - DNA, 20 bp, Sus scrofa
ttgagaggatttgggacatg

SEQ ID NO: 6090 - DNA, 20 bp, Sus scrofa
ggacatgaggaagaaagagt

SEQ ID NO: 6091 - DNA, 20 bp, Sus scrofa
gacatgaggaagaaagagta

SEQ ID NO: 6092 - DNA, 20 bp, Sus scrofa
taaacagaaggttctaatca

SEQ ID NO: 6093 - DNA, 20 bp, Sus scrofa
ttagaccccaaataaacaga

SEQ ID NO: 6094 - DNA, 20 bp, Sus scrofa
attagaaccttctgtttatt

SEQ ID NO: 6095 - DNA, 20 bp, Sus scrofa
ttagaaccttctgtttattt

SEQ ID NO: 6096 - DNA, 20 bp, Sus scrofa
tagaaccttctgtttatttg

SEQ ID NO: 6097 - DNA, 20 bp, Sus scrofa
tgtttatttggggtctaatt

SEQ ID NO: 6098 - DNA, 20 bp, Sus scrofa
ttatttggggtctaattagg

SEQ ID NO: 6099 - DNA, 20 bp, Sus scrofa
gcggggcagagatagtgtca

SEQ ID NO: 6100 - DNA, 20 bp, Sus scrofa
ggaggtgcttggagcatgcg

SEQ ID NO: 6101 - DNA, 20 bp, Sus scrofa
gggaggtgcttggagcatgc

SEQ ID NO: 6102 - DNA, 20 bp, Sus scrofa
agggaggtgcttggagcatg

SEQ ID NO: 6103 - DNA, 20 bp, Sus scrofa
gccttaacaagggaggtgct

SEQ ID NO: 6104 - DNA, 20 bp, Sus scrofa
ctagactgccttaacaaggg

SEQ ID NO: 6105 - DNA, 20 bp, Sus scrofa
tccaagcacctcccttgtta

SEQ ID NO: 6106 - DNA, 20 bp, Sus scrofa
aatctagactgccttaacaa

SEQ ID NO: 6107 - DNA, 20 bp, Sus scrofa
gaatctagactgccttaaca

SEQ ID NO: 6108 - DNA, 20 bp, Sus scrofa
atttgcttcctggagtgtga

SEQ ID NO: 6109 - DNA, 20 bp, Sus scrofa
tctagattccttcacactcc

SEQ ID NO: 6110 - DNA, 20 bp, Sus scrofa
cctctccccaatttgcttcc

SEQ ID NO: 6111 - DNA, 20 bp, Sus scrofa
tcacactccaggaagcaaat

SEQ ID NO: 6112 - DNA, 20 bp, Sus scrofa
cacactccaggaagcaaatt

SEQ ID NO: 6113 - DNA, 20 bp, Sus scrofa
acactccaggaagcaaattg

SEQ ID NO: 6114 - DNA, 20 bp, Sus scrofa
ccaggaagcaaattggggag

SEQ ID NO: 6115 - DNA, 20 bp, Sus scrofa
caggaagcaaattggggaga

SEQ ID NO: 6116 - DNA, 20 bp, Sus scrofa
gaagcaaattggggagaggg

SEQ ID NO: 6117 - DNA, 20 bp, Sus scrofa
aagcaaattggggagaggga

SEQ ID NO: 6118 - DNA, 20 bp, Sus scrofa
attatctcatgctgctgtca

SEQ ID NO: 6119 - DNA, 20 bp, Sus scrofa
gtgaaaaggtgtctgtattt

SEQ ID NO: 6120 - DNA, 20 bp, Sus scrofa
taaataggaccctggtgaaa

SEQ ID NO: 6121 - DNA, 20 bp, Sus scrofa
aatacagacaccttttcacc

SEQ ID NO: 6122 - DNA, 20 bp, Sus scrofa
atacagacaccttttcacca

SEQ ID NO: 6123 - DNA, 20 bp, Sus scrofa
ccaaaatctaaataggaccc

SEQ ID NO: 6124 - DNA, 20 bp, Sus scrofa
aaaaagaccaaaatctaaat

SEQ ID NO: 6125 - DNA, 20 bp, Sus scrofa
ccagggtcctatttagattt

SEQ ID NO: 6126 - DNA, 20 bp, Sus scrofa
atttagattttggtcttttt

SEQ ID NO: 6127 - DNA, 20 bp, Sus scrofa
tttagattttggtcttttta

SEQ ID NO: 6128 - DNA, 20 bp, Sus scrofa
attttggtctttttagggct

SEQ ID NO: 6129 - DNA, 20 bp, Sus scrofa
agcctatgccacagcaactt

SEQ ID NO: 6130 - DNA, 20 bp, Sus scrofa
cagcctatgccacagcaact

SEQ ID NO: 6131 - DNA, 20 bp, Sus scrofa
gctcggatcccaagttgctg

SEQ ID NO: 6132 - DNA, 20 bp, Sus scrofa
atcccaagttgctgtggcat

SEQ ID NO: 6133 - DNA, 20 bp, Sus scrofa
caagttgctgtggcataggc

SEQ ID NO: 6134 - DNA, 20 bp, Sus scrofa
gttgctgtggcataggctgg

SEQ ID NO: 6135 - DNA, 20 bp, Sus scrofa
tcccaggccaggggtcgaat

SEQ ID NO: 6136 - DNA, 20 bp, Sus scrofa
tgcagctccgattcgacccc

SEQ ID NO: 6137 - DNA, 20 bp, Sus scrofa
ctccgattcgacccctggcc

SEQ ID NO: 6138 - DNA, 20 bp, Sus scrofa
catggaggttcccaggccag

SEQ ID NO: 6139 - DNA, 20 bp, Sus scrofa
tccgattcgacccctggcct

SEQ ID NO: 6140 - DNA, 20 bp, Sus scrofa
acatggaggttcccaggcca

SEQ ID NO: 6141 - DNA, 20 bp, Sus scrofa
cacatggaggttcccaggcc

SEQ ID NO: 6142 - DNA, 20 bp, Sus scrofa
tacaccacatggaggttccc

SEQ ID NO: 6143 - DNA, 20 bp, Sus scrofa
ctggcctgggaacctccatg

SEQ ID NO: 6144 - DNA, 20 bp, Sus scrofa
accactcctacaccacatgg

SEQ ID NO: 6145 - DNA, 20 bp, Sus scrofa
aggaccactcctacaccaca

SEQ ID NO: 6146 - DNA, 20 bp, Sus scrofa
tgggaacctccatgtggtgt

SEQ ID NO: 6147 - DNA, 20 bp, Sus scrofa
acctccatgtggtgtaggag

SEQ ID NO: 6148 - DNA, 20 bp, Sus scrofa
tgtaggagtggtcctagaaa

SEQ ID NO: 6149 - DNA, 20 bp, Sus scrofa
actttttttttgccttttct

SEQ ID NO: 6150 - DNA, 20 bp, Sus scrofa
atcttttgcagttcctattg

SEQ ID NO: 6151 - DNA, 20 bp, Sus scrofa
caactgcaccgtgccacaat

SEQ ID NO: 6152 - DNA, 20 bp, Sus scrofa
ttgcagttcctattgtggca

SEQ ID NO: 6153 - DNA, 20 bp, Sus scrofa
gactagaaactgtgaagttg

SEQ ID NO: 6154 - DNA, 20 bp, Sus scrofa
actagaaactgtgaagttgc

SEQ ID NO: 6155 - DNA, 20 bp, Sus scrofa
ttatcccaccgagctaggct

SEQ ID NO: 6156 - DNA, 20 bp, Sus scrofa
gttcgatgcctagcctagct

SEQ ID NO: 6157 - DNA, 20 bp, Sus scrofa
aatccttatcccaccgagct

SEQ ID NO: 6158 - DNA, 20 bp, Sus scrofa
cgatgcctagcctagctcgg

SEQ ID NO: 6159 - DNA, 20 bp, Sus scrofa
gatgcctagcctagctcggt

SEQ ID NO: 6160 - DNA, 20 bp, Sus scrofa
tagcctagctcggtgggata

SEQ ID NO: 6161 - DNA, 20 bp, Sus scrofa
tagctcggtgggataaggat

SEQ ID NO: 6162 - DNA, 20 bp, Sus scrofa
ccgacctacaccacagctcg

SEQ ID NO: 6163 - DNA, 20 bp, Sus scrofa
ttggacgttgccccgagctg

SEQ ID NO: 6164 - DNA, 20 bp, Sus scrofa
gccgacctacaccacagctc

SEQ ID NO: 6165 - DNA, 20 bp, Sus scrofa
tgccgacctacaccacagct

SEQ ID NO: 6166 - DNA, 20 bp, Sus scrofa
gttgccccgagctgtggtgt

SEQ ID NO: 6167 - DNA, 20 bp, Sus scrofa
ccccgagctgtggtgtaggt

SEQ ID NO: 6168 - DNA, 20 bp, Sus scrofa
gtggtgtaggtcggcagctg

SEQ ID NO: 6169 - DNA, 20 bp, Sus scrofa
tggctctgattaacccgtcc

SEQ ID NO: 6170 - DNA, 20 bp, Sus scrofa
ggctctgattaacccgtcct

SEQ ID NO: 6171 - DNA, 20 bp, Sus scrofa
catatggaggttcccaggac

SEQ ID NO: 6172 - DNA, 20 bp, Sus scrofa
gcatatggaggttcccagga

SEQ ID NO: 6173 - DNA, 20 bp, Sus scrofa
tgcggcatatggaggttccc

SEQ ID NO: 6174 - DNA, 20 bp, Sus scrofa
gccacacctgcggcatatgg

SEQ ID NO: 6175 - DNA, 20 bp, Sus scrofa
agggccacacctgcggcata

SEQ ID NO: 6176 - DNA, 20 bp, Sus scrofa
tgggaacctccatatgccgc

SEQ ID NO: 6177 - DNA, 20 bp, Sus scrofa
acctccatatgccgcaggtg

SEQ ID NO: 6178 - DNA, 20 bp, Sus scrofa
cttttttagggccacacctg

SEQ ID NO: 6179 - DNA, 20 bp, Sus scrofa
acagagaagattataacctc

SEQ ID NO: 6180 - DNA, 20 bp, Sus scrofa
taagcatatggatgtaccag

SEQ ID NO: 6181 - DNA, 20 bp, Sus scrofa
ctaaagaaattctaagcata

SEQ ID NO: 6182 - DNA, 20 bp, Sus scrofa
ctgtttgtcacttactattt

SEQ ID NO: 6183 - DNA, 20 bp, Sus scrofa
tgcattaattgattatattt

SEQ ID NO: 6184 - DNA, 20 bp, Sus scrofa
tgattatatttaggatcaga

SEQ ID NO: 6185 - DNA, 20 bp, Sus scrofa
atgatgaaccaggggaaact

SEQ ID NO: 6186 - DNA, 20 bp, Sus scrofa
cttcatatccaagtttcccc

SEQ ID NO: 6187 - DNA, 20 bp, Sus scrofa
ctgagcagatgatgaaccag

SEQ ID NO: 6188 - DNA, 20 bp, Sus scrofa
actgagcagatgatgaacca

SEQ ID NO: 6189 - DNA, 20 bp, Sus scrofa
gactgagcagatgatgaacc

SEQ ID NO: 6190 - DNA, 20 bp, Sus scrofa
tacatcaatcaggactgcag

SEQ ID NO: 6191 - DNA, 20 bp, Sus scrofa
ttacatcaatcaggactgca

SEQ ID NO: 6192 - DNA, 20 bp, Sus scrofa
tttacatcaatcaggactgc

SEQ ID NO: 6193 - DNA, 20 bp, Sus scrofa
catagaggtttacatcaatc

SEQ ID NO: 6194 - DNA, 20 bp, Sus scrofa
tgaagaaaaaaatggcatag

SEQ ID NO: 6195 - DNA, 20 bp, Sus scrofa
ctgtcaaatgaagaaaaaaa

SEQ ID NO: 6196 - DNA, 20 bp, Sus scrofa
tcttcatttgacagttgtga

SEQ ID NO: 6197 - DNA, 20 bp, Sus scrofa
tttttctcagcttgcaccca

SEQ ID NO: 6198 - DNA, 20 bp, Sus scrofa
tctcagcttgcacccatgga

SEQ ID NO: 6199 - DNA, 20 bp, Sus scrofa
cttgggtttgttccttccat

SEQ ID NO: 6200 - DNA, 20 bp, Sus scrofa
acttgggtttgttccttcca

SEQ ID NO: 6201 - DNA, 20 bp, Sus scrofa
catggtcactgctgtgactt

SEQ ID NO: 6202 - DNA, 20 bp, Sus scrofa
gcatggtcactgctgtgact

SEQ ID NO: 6203 - DNA, 20 bp, Sus scrofa
ggttaaggaaggactcagca

SEQ ID NO: 6204 - DNA, 20 bp, Sus scrofa
ggtggcctaggggttaagga

SEQ ID NO: 6205 - DNA, 20 bp, Sus scrofa
gcctggtggcctaggggtta

SEQ ID NO: 6206 - DNA, 20 bp, Sus scrofa
tgagtccttccttaacccct

SEQ ID NO: 6207 - DNA, 20 bp, Sus scrofa
ggagttgcctggtggcctag

SEQ ID NO: 6208 - DNA, 20 bp, Sus scrofa
aggagttgcctggtggccta

SEQ ID NO: 6209 - DNA, 20 bp, Sus scrofa
caggagttgcctggtggcct

SEQ ID NO: 6210 - DNA, 20 bp, Sus scrofa
tccttaacccctaggccacc

SEQ ID NO: 6211 - DNA, 20 bp, Sus scrofa
agccttcaggagttgcctgg

SEQ ID NO: 6212 - DNA, 20 bp, Sus scrofa
aaaagccttcaggagttgcc

SEQ ID NO: 6213 - DNA, 20 bp, Sus scrofa
ggccaccaggcaactcctga

SEQ ID NO: 6214 - DNA, 20 bp, Sus scrofa
caatatgagaaaaagccttc

SEQ ID NO: 6215 - DNA, 20 bp, Sus scrofa
ctttttctcatattgagata

SEQ ID NO: 6216 - DNA, 20 bp, Sus scrofa
ggagtcactgcttcatggta

SEQ ID NO: 6217 - DNA, 20 bp, Sus scrofa
gtggaggagtcactgcttca

SEQ ID NO: 6218 - DNA, 20 bp, Sus scrofa
tgtcacaggtgtaggggtgg

SEQ ID NO: 6219 - DNA, 20 bp, Sus scrofa
atgtgtcacaggtgtagggg

SEQ ID NO: 6220 - DNA, 20 bp, Sus scrofa
tccatgtgtcacaggtgtag

SEQ ID NO: 6221 - DNA, 20 bp, Sus scrofa
ttccatgtgtcacaggtgta

SEQ ID NO: 6222 - DNA, 20 bp, Sus scrofa
cttccatgtgtcacaggtgt

SEQ ID NO: 6223 - DNA, 20 bp, Sus scrofa
tggggacttccatgtgtcac

SEQ ID NO: 6224 - DNA, 20 bp, Sus scrofa
acccctacacctgtgacaca

SEQ ID NO: 6225 - DNA, 20 bp, Sus scrofa
cacatggaagtccccagtcc

SEQ ID NO: 6226 - DNA, 20 bp, Sus scrofa
cagattggatccctggactg

SEQ ID NO: 6227 - DNA, 20 bp, Sus scrofa
acatggaagtccccagtcca

SEQ ID NO: 6228 - DNA, 20 bp, Sus scrofa
tcagattggatccctggact

SEQ ID NO: 6229 - DNA, 20 bp, Sus scrofa
ctcagattggatccctggac

SEQ ID NO: 6230 - DNA, 20 bp, Sus scrofa
tatagctcagattggatccc

SEQ ID NO: 6231 - DNA, 20 bp, Sus scrofa
ttcccaggtatagctcagat

SEQ ID NO: 6232 - DNA, 20 bp, Sus scrofa
gatccaatctgagctatacc

SEQ ID NO: 6233 - DNA, 20 bp, Sus scrofa
atccaatctgagctatacct

SEQ ID NO: 6234 - DNA, 20 bp, Sus scrofa
ttaaaaacctggtgtttccc

SEQ ID NO: 6235 - DNA, 20 bp, Sus scrofa
agctatacctgggaaacacc

SEQ ID NO: 6236 - DNA, 20 bp, Sus scrofa
ggtgcagtgggttaaaaacc

SEQ ID NO: 6237 - DNA, 20 bp, Sus scrofa
gatcctcagccaggtgcagt

SEQ ID NO: 6238 - DNA, 20 bp, Sus scrofa
tgatcctcagccaggtgcag

SEQ ID NO: 6239 - DNA, 20 bp, Sus scrofa
ggtttttaacccactgcacc

SEQ ID NO: 6240 - DNA, 20 bp, Sus scrofa
taacccactgcacctggctg

SEQ ID NO: 6241 - DNA, 20 bp, Sus scrofa
tgcgggtttgatcctcagcc

SEQ ID NO: 6242 - DNA, 20 bp, Sus scrofa
gtattgcctcagggcagtgc

SEQ ID NO: 6243 - DNA, 20 bp, Sus scrofa
agtattgcctcagggcagtg

SEQ ID NO: 6244 - DNA, 20 bp, Sus scrofa
atcaaacccgcactgccctg

SEQ ID NO: 6245 - DNA, 20 bp, Sus scrofa
tagtatccagtattgcctca

SEQ ID NO: 6246 - DNA, 20 bp, Sus scrofa
ttagtatccagtattgcctc

SEQ ID NO: 6247 - DNA, 20 bp, Sus scrofa
gcactgccctgaggcaatac

SEQ ID NO: 6248 - DNA, 20 bp, Sus scrofa
aatactggatactaaaccag

SEQ ID NO: 6249 - DNA, 20 bp, Sus scrofa
agttcctgctgtggtgccac

SEQ ID NO: 6250 - DNA, 20 bp, Sus scrofa
taaaccagtggcaccacagc

SEQ ID NO: 6251 - DNA, 20 bp, Sus scrofa
ctgctaaggagttcctgctg

SEQ ID NO: 6252 - DNA, 20 bp, Sus scrofa
ttttaaaaaggtcactgcta

SEQ ID NO: 6253 - DNA, 20 bp, Sus scrofa
atattgatctatttttaaaa

SEQ ID NO: 6254 - DNA, 20 bp, Sus scrofa
attattgaaatgtttaaata

SEQ ID NO: 6255 - DNA, 20 bp, Sus scrofa
gaaatgtttaaataaggtta

SEQ ID NO: 6256 - DNA, 20 bp, Sus scrofa
atgtttaaataaggttatgg

SEQ ID NO: 6257 - DNA, 20 bp, Sus scrofa
gttatggaggagttccctta

SEQ ID NO: 6258 - DNA, 20 bp, Sus scrofa
cttaacctcctgcaccataa

SEQ ID NO: 6259 - DNA, 20 bp, Sus scrofa
ccttaacctcctgcaccata

SEQ ID NO: 6260 - DNA, 20 bp, Sus scrofa
gaggagttcccttatggtgc

SEQ ID NO: 6261 - DNA, 20 bp, Sus scrofa
gagttcccttatggtgcagg

SEQ ID NO: 6262 - DNA, 20 bp, Sus scrofa
ccttatggtgcaggaggtta

SEQ ID NO: 6263 - DNA, 20 bp, Sus scrofa
ccaagccactgcagtggcaa

SEQ ID NO: 6264 - DNA, 20 bp, Sus scrofa
aggatccattgccactgcag

SEQ ID NO: 6265 - DNA, 20 bp, Sus scrofa
agagacccaagccactgcag

SEQ ID NO: 6266 - DNA, 20 bp, Sus scrofa
ccattgccactgcagtggct

SEQ ID NO: 6267 - DNA, 20 bp, Sus scrofa
cattgccactgcagtggctt

SEQ ID NO: 6268 - DNA, 20 bp, Sus scrofa
agtggcttgggtctctgctg

SEQ ID NO: 6269 - DNA, 20 bp, Sus scrofa
cttgggtctctgctgtggtg

SEQ ID NO: 6270 - DNA, 20 bp, Sus scrofa
ttccacaacttttgtgtgtg

SEQ ID NO: 6271 - DNA, 20 bp, Sus scrofa
ggccacacacacaaaagttg

SEQ ID NO: 6272 - DNA, 20 bp, Sus scrofa
tcagggaaagttgactggct

SEQ ID NO: 6273 - DNA, 20 bp, Sus scrofa
ctcagggaaagttgactggc

SEQ ID NO: 6274 - DNA, 20 bp, Sus scrofa
tctcctcagggaaagttgac

SEQ ID NO: 6275 - DNA, 20 bp, Sus scrofa
cagccagtcaactttccctg

SEQ ID NO: 6276 - DNA, 20 bp, Sus scrofa
cttctcaagaattctcctca

SEQ ID NO: 6277 - DNA, 20 bp, Sus scrofa
tcttctcaagaattctcctc

SEQ ID NO: 6278 - DNA, 20 bp, Sus scrofa
agtgtgtgaaatgttacata

SEQ ID NO: 6279 - DNA, 20 bp, Sus scrofa
gtgtgtgaaatgttacataa

SEQ ID NO: 6280 - DNA, 20 bp, Sus scrofa
gatatgctgtgggacaaaaa

SEQ ID NO: 6281 - DNA, 20 bp, Sus scrofa
taatttccaggatatgctgt

SEQ ID NO: 6282 - DNA, 20 bp, Sus scrofa
ctaatttccaggatatgctg

SEQ ID NO: 6283 - DNA, 20 bp, Sus scrofa
ttttgtcccacagcatatcc

SEQ ID NO: 6284 - DNA, 20 bp, Sus scrofa
tcaaggagggactaatttcc

SEQ ID NO: 6285 - DNA, 20 bp, Sus scrofa
atttaattgtccatcaagga

SEQ ID NO: 6286 - DNA, 20 bp, Sus scrofa
ggaaattagtccctccttga

SEQ ID NO: 6287 - DNA, 20 bp, Sus scrofa
aatttaattgtccatcaagg

SEQ ID NO: 6288 - DNA, 20 bp, Sus scrofa
ggcaatttaattgtccatca

SEQ ID NO: 6289 - DNA, 20 bp, Sus scrofa
aaagaactgagaaaattaga

SEQ ID NO: 6290 - DNA, 20 bp, Sus scrofa
aataagacataagaagtaac

SEQ ID NO: 6291 - DNA, 20 bp, Sus scrofa
tgtcttatttataagccttt

SEQ ID NO: 6292 - DNA, 20 bp, Sus scrofa
attagtttcaacactccgaa

SEQ ID NO: 6293 - DNA, 20 bp, Sus scrofa
tttcggagtgttgaaactaa

SEQ ID NO: 6294 - DNA, 20 bp, Sus scrofa
ttcggagtgttgaaactaat

SEQ ID NO: 6295 - DNA, 20 bp, Sus scrofa
tgaaactaatgggtcacctt

SEQ ID NO: 6296 - DNA, 20 bp, Sus scrofa
gaaactaatgggtcaccttt

SEQ ID NO: 6297 - DNA, 20 bp, Sus scrofa
attgggtttgtagtacccaa

SEQ ID NO: 6298 - DNA, 20 bp, Sus scrofa
tcttagtaccaattagaatt

SEQ ID NO: 6299 - DNA, 20 bp, Sus scrofa
gtcttagtaccaattagaat

SEQ ID NO: 6300 - DNA, 20 bp, Sus scrofa
actacaaacccaattctaat

SEQ ID NO: 6301 - DNA, 20 bp, Sus scrofa
aaaggagacttaagaagaat

SEQ ID NO: 6302 - DNA, 20 bp, Sus scrofa
tcttcttaagtctcctttgc

SEQ ID NO: 6303 - DNA, 20 bp, Sus scrofa
aaccctgggggatcctgcaa

SEQ ID NO: 6304 - DNA, 20 bp, Sus scrofa
tctcctttgcaggatccccc

SEQ ID NO: 6305 - DNA, 20 bp, Sus scrofa
ctcctttgcaggatccccca

SEQ ID NO: 6306 - DNA, 20 bp, Sus scrofa
aaccaaggatggaaccctgg

SEQ ID NO: 6307 - DNA, 20 bp, Sus scrofa
gaaccaaggatggaaccctg

SEQ ID NO: 6308 - DNA, 20 bp, Sus scrofa
agaaccaaggatggaaccct

SEQ ID NO: 6309 - DNA, 20 bp, Sus scrofa
gagaaccaaggatggaaccc

SEQ ID NO: 6310 - DNA, 20 bp, Sus scrofa
atcccccagggttccatcct

SEQ ID NO: 6311 - DNA, 20 bp, Sus scrofa
cctaggaagagaaccaagga

SEQ ID NO: 6312 - DNA, 20 bp, Sus scrofa
aattcctaggaagagaacca

SEQ ID NO: 6313 - DNA, 20 bp, Sus scrofa
ccatccttggttctcttcct

SEQ ID NO: 6314 - DNA, 20 bp, Sus scrofa
agtagaaggatggaattcct

SEQ ID NO: 6315 - DNA, 20 bp, Sus scrofa
agcaataaaaagtagaagga

SEQ ID NO: 6316 - DNA, 20 bp, Sus scrofa
cagaagcaataaaaagtaga

SEQ ID NO: 6317 - DNA, 20 bp, Sus scrofa
agttctgtatttggaagtca

SEQ ID NO: 6318 - DNA, 20 bp, Sus scrofa
aagttctgtatttggaagtc

SEQ ID NO: 6319 - DNA, 20 bp, Sus scrofa
ctcggtttaagttctgtatt

SEQ ID NO: 6320 - DNA, 20 bp, Sus scrofa
caaatacagaacttaaaccg

SEQ ID NO: 6321 - DNA, 20 bp, Sus scrofa
ctggagttcaggggagtcct

SEQ ID NO: 6322 - DNA, 20 bp, Sus scrofa
catgcaggtctggagttcag

SEQ ID NO: 6323 - DNA, 20 bp, Sus scrofa
acatgcaggtctggagttca

SEQ ID NO: 6324 - DNA, 20 bp, Sus scrofa
gacatgcaggtctggagttc

SEQ ID NO: 6325 - DNA, 20 bp, Sus scrofa
gtcagctagacatgcaggtc

SEQ ID NO: 6326 - DNA, 20 bp, Sus scrofa
ccccagtcagctagacatgc

SEQ ID NO: 6327 - DNA, 20 bp, Sus scrofa
gacctgcatgtctagctgac

SEQ ID NO: 6328 - DNA, 20 bp, Sus scrofa
acctgcatgtctagctgact

SEQ ID NO: 6329 - DNA, 20 bp, Sus scrofa
cctgcatgtctagctgactg

SEQ ID NO: 6330 - DNA, 20 bp, Sus scrofa
tgactggggatactttcatc

SEQ ID NO: 6331 - DNA, 20 bp, Sus scrofa
actttcatctggatatccca

SEQ ID NO: 6332 - DNA, 20 bp, Sus scrofa
gataccaagtttgtttccat

SEQ ID NO: 6333 - DNA, 20 bp, Sus scrofa
agataccaagtttgtttcca

SEQ ID NO: 6334 - DNA, 20 bp, Sus scrofa
atatcccatggaaacaaact

SEQ ID NO: 6335 - DNA, 20 bp, Sus scrofa
gtggcttctttttgggagag

SEQ ID NO: 6336 - DNA, 20 bp, Sus scrofa
ggaaggagtggcttcttttt

SEQ ID NO: 6337 - DNA, 20 bp, Sus scrofa
aggaaggagtggcttctttt

SEQ ID NO: 6338 - DNA, 20 bp, Sus scrofa
tagatggaaataggaaggag

SEQ ID NO: 6339 - DNA, 20 bp, Sus scrofa
gtagctagatggaaatagga

SEQ ID NO: 6340 - DNA, 20 bp, Sus scrofa
ctatgtagctagatggaaat

SEQ ID NO: 6341 - DNA, 20 bp, Sus scrofa
atggggactatgtagctaga

SEQ ID NO: 6342 - DNA, 20 bp, Sus scrofa
tgaggttcgtttgagaaatg

SEQ ID NO: 6343 - DNA, 20 bp, Sus scrofa
ctgaggttcgtttgagaaat

SEQ ID NO: 6344 - DNA, 20 bp, Sus scrofa
actgaggttcgtttgagaaa

SEQ ID NO: 6345 - DNA, 20 bp, Sus scrofa
caaaagatgataaagaactg

SEQ ID NO: 6346 - DNA, 20 bp, Sus scrofa
aatctgcaagtttaactgtg

SEQ ID NO: 6347 - DNA, 20 bp, Sus scrofa
aaatctgcaagtttaactgt

SEQ ID NO: 6348 - DNA, 20 bp, Sus scrofa
aaaatctgcaagtttaactg

SEQ ID NO: 6349 - DNA, 20 bp, Sus scrofa
ggaggggaaaaaagttaaag

SEQ ID NO: 6350 - DNA, 20 bp, Sus scrofa
caaataacagaaactgggag

SEQ ID NO: 6351 - DNA, 20 bp, Sus scrofa
ccaaataacagaaactggga

SEQ ID NO: 6352 - DNA, 20 bp, Sus scrofa
accaaataacagaaactggg

SEQ ID NO: 6353 - DNA, 20 bp, Sus scrofa
tgaaccaaataacagaaact

SEQ ID NO: 6354 - DNA, 20 bp, Sus scrofa
ctgaaccaaataacagaaac

SEQ ID NO: 6355 - DNA, 20 bp, Sus scrofa
ccctcccagtttctgttatt

SEQ ID NO: 6356 - DNA, 20 bp, Sus scrofa
tctcatatttgaatgtttta

SEQ ID NO: 6357 - DNA, 20 bp, Sus scrofa
gttttatggtagtctttttt

SEQ ID NO: 6358 - DNA, 20 bp, Sus scrofa
ttttatggtagtcttttttt

SEQ ID NO: 6359 - DNA, 20 bp, Sus scrofa
tctttttttgggctatgcca

SEQ ID NO: 6360 - DNA, 20 bp, Sus scrofa
cggggaacttccacatgccg

SEQ ID NO: 6361 - DNA, 20 bp, Sus scrofa
ttgggctatgccacggcatg

SEQ ID NO: 6362 - DNA, 20 bp, Sus scrofa
gtgggttcaatctatggacg

SEQ ID NO: 6363 - DNA, 20 bp, Sus scrofa
tgtgggttcaatctatggac

SEQ ID NO: 6364 - DNA, 20 bp, Sus scrofa
gtgtgggttcaatctatgga

SEQ ID NO: 6365 - DNA, 20 bp, Sus scrofa
tcaggtgtgggttcaatcta

SEQ ID NO: 6366 - DNA, 20 bp, Sus scrofa
cactgtagtggctcaggtgt

SEQ ID NO: 6367 - DNA, 20 bp, Sus scrofa
tcactgtagtggctcaggtg

SEQ ID NO: 6368 - DNA, 20 bp, Sus scrofa
caacgtcactgtagtggctc

SEQ ID NO: 6369 - DNA, 20 bp, Sus scrofa
attcagcaacgtcactgtag

SEQ ID NO: 6370 - DNA, 20 bp, Sus scrofa
ccttgcggcgaagtgggtta

SEQ ID NO: 6371 - DNA, 20 bp, Sus scrofa
gagttcccttgcggcgaagt

SEQ ID NO: 6372 - DNA, 20 bp, Sus scrofa
ggagttcccttgcggcgaag

SEQ ID NO: 6373 - DNA, 20 bp, Sus scrofa
ccttaacccacttcgccgca

SEQ ID NO: 6374 - DNA, 20 bp, Sus scrofa
cttaacccacttcgccgcaa

SEQ ID NO: 6375 - DNA, 20 bp, Sus scrofa
ataaagctggagttcccttg

SEQ ID NO: 6376 - DNA, 20 bp, Sus scrofa
gcaagggaactccagcttta

SEQ ID NO: 6377 - DNA, 20 bp, Sus scrofa
atcaaagactaccataaagc

SEQ ID NO: 6378 - DNA, 20 bp, Sus scrofa
acaaaattctgctttaacta

SEQ ID NO: 6379 - DNA, 20 bp, Sus scrofa
tccactgtgaaatcaactct

SEQ ID NO: 6380 - DNA, 20 bp, Sus scrofa
tccaagagttgatttcacag

SEQ ID NO: 6381 - DNA, 20 bp, Sus scrofa
ttgatttcacagtggactcg

SEQ ID NO: 6382 - DNA, 20 bp, Sus scrofa
ataatgtttaaactcctctg

SEQ ID NO: 6383 - DNA, 20 bp, Sus scrofa
caatatgtcaaaagccacag

SEQ ID NO: 6384 - DNA, 20 bp, Sus scrofa
ctctgtggcttttgacatat

SEQ ID NO: 6385 - DNA, 20 bp, Sus scrofa
ctaaacatttccatttcatt

SEQ ID NO: 6386 - DNA, 20 bp, Sus scrofa
agaaaatctaccaaatgaaa

SEQ ID NO: 6387 - DNA, 20 bp, Sus scrofa
gctgtattgcaatactactt

SEQ ID NO: 6388 - DNA, 20 bp, Sus scrofa
tgcaatactacttaggtgag

SEQ ID NO: 6389 - DNA, 20 bp, Sus scrofa
taggtgagtggtgattacag

SEQ ID NO: 6390 - DNA, 20 bp, Sus scrofa
aatcattaaaaaaaaaaaaa

SEQ ID NO: 6391 - DNA, 20 bp, Sus scrofa
ttttttttttaatgattagt

SEQ ID NO: 6392 - DNA, 20 bp, Sus scrofa
tttaatgattagttggtttt

SEQ ID NO: 6393 - DNA, 20 bp, Sus scrofa
ttaatgattagttggtttta

SEQ ID NO: 6394 - DNA, 20 bp, Sus scrofa
ttgttttttgttttcttttg

SEQ ID NO: 6395 - DNA, 20 bp, Sus scrofa
tgttttttgttttcttttga

SEQ ID NO: 6396 - DNA, 20 bp, Sus scrofa
aacatatttcactgggggtg

SEQ ID NO: 6397 - DNA, 20 bp, Sus scrofa
gaactaacatatttcactgg

SEQ ID NO: 6398 - DNA, 20 bp, Sus scrofa
tgaactaacatatttcactg

SEQ ID NO: 6399 - DNA, 20 bp, Sus scrofa
gtgaactaacatatttcact

SEQ ID NO: 6400 - DNA, 20 bp, Sus scrofa
tgtgaactaacatatttcac

SEQ ID NO: 6401 - DNA, 20 bp, Sus scrofa
agtgaaatatgttagttcac

SEQ ID NO: 6402 - DNA, 20 bp, Sus scrofa
aatatgttagttcacaggct

SEQ ID NO: 6403 - DNA, 20 bp, Sus scrofa
atatgttagttcacaggcta

SEQ ID NO: 6404 - DNA, 20 bp, Sus scrofa
tatgttagttcacaggctag

SEQ ID NO: 6405 - DNA, 20 bp, Sus scrofa
ctaatcagagctgcagctgc

SEQ ID NO: 6406 - DNA, 20 bp, Sus scrofa
atccctaggtgctgtggcat

SEQ ID NO: 6407 - DNA, 20 bp, Sus scrofa
gatccctaggtgctgtggca

SEQ ID NO: 6408 - DNA, 20 bp, Sus scrofa
gctcagatccctaggtgctg

SEQ ID NO: 6409 - DNA, 20 bp, Sus scrofa
tggcccatgccacagcacct

SEQ ID NO: 6410 - DNA, 20 bp, Sus scrofa
ggcccatgccacagcaccta

SEQ ID NO: 6411 - DNA, 20 bp, Sus scrofa
aagatgtggctcagatccct

SEQ ID NO: 6412 - DNA, 20 bp, Sus scrofa
tgtggtgtaggtcaaagatg

SEQ ID NO: 6413 - DNA, 20 bp, Sus scrofa
attgctgtaagctgtggtgt

SEQ ID NO: 6414 - DNA, 20 bp, Sus scrofa
tctggcattgctgtaagctg

SEQ ID NO: 6415 - DNA, 20 bp, Sus scrofa
actcaatgggttaaaggatc

SEQ ID NO: 6416 - DNA, 20 bp, Sus scrofa
ggacccactcaatgggttaa

SEQ ID NO: 6417 - DNA, 20 bp, Sus scrofa
agatcctttaacccattgag

SEQ ID NO: 6418 - DNA, 20 bp, Sus scrofa
gatccctggacccactcaat

SEQ ID NO: 6419 - DNA, 20 bp, Sus scrofa
gatcctttaacccattgagt

SEQ ID NO: 6420 - DNA, 20 bp, Sus scrofa
tgatccctggacccactcaa

SEQ ID NO: 6421 - DNA, 20 bp, Sus scrofa
ttaacccattgagtgggtcc

SEQ ID NO: 6422 - DNA, 20 bp, Sus scrofa
taacccattgagtgggtcca

SEQ ID NO: 6423 - DNA, 20 bp, Sus scrofa
aagactcaggttttgatccc

SEQ ID NO: 6424 - DNA, 20 bp, Sus scrofa
accagtatccaggaagactc

SEQ ID NO: 6425 - DNA, 20 bp, Sus scrofa
gatcaaaacctgagtcttcc

SEQ ID NO: 6426 - DNA, 20 bp, Sus scrofa
acctgagtcttcctggatac

SEQ ID NO: 6427 - DNA, 20 bp, Sus scrofa
cacaaacctgaccagtatcc

SEQ ID NO: 6428 - DNA, 20 bp, Sus scrofa
agtcttcctggatactggtc

SEQ ID NO: 6429 - DNA, 20 bp, Sus scrofa
agttcccattgtggctcagt

SEQ ID NO: 6430 - DNA, 20 bp, Sus scrofa
gagttcccattgtggctcag

SEQ ID NO: 6431 - DNA, 20 bp, Sus scrofa
tgtgacccactgagccacaa

SEQ ID NO: 6432 - DNA, 20 bp, Sus scrofa
gtgacccactgagccacaat

SEQ ID NO: 6433 - DNA, 20 bp, Sus scrofa
tccaacaggagttcccattg

SEQ ID NO: 6434 - DNA, 20 bp, Sus scrofa
gccacaatgggaactcctgt

SEQ ID NO: 6435 - DNA, 20 bp, Sus scrofa
ctccaggcaagctttccaac

SEQ ID NO: 6436 - DNA, 20 bp, Sus scrofa
ctcctgttggaaagcttgcc

SEQ ID NO: 6437 - DNA, 20 bp, Sus scrofa
ctgttggaaagcttgcctgg

SEQ ID NO: 6438 - DNA, 20 bp, Sus scrofa
taaaagaggaagtaacctcc

SEQ ID NO: 6439 - DNA, 20 bp, Sus scrofa
ggtggccaaaaaaataaaag

SEQ ID NO: 6440 - DNA, 20 bp, Sus scrofa
tacttcctcttttatttttt

SEQ ID NO: 6441 - DNA, 20 bp, Sus scrofa
gaactccatgtgctgcaggg

SEQ ID NO: 6442 - DNA, 20 bp, Sus scrofa
tgggaactccatgtgctgca

SEQ ID NO: 6443 - DNA, 20 bp, Sus scrofa
ctgggaactccatgtgctgc

SEQ ID NO: 6444 - DNA, 20 bp, Sus scrofa
tttggccaccctgcagcaca

SEQ ID NO: 6445 - DNA, 20 bp, Sus scrofa
ctgcagcacatggagttccc

SEQ ID NO: 6446 - DNA, 20 bp, Sus scrofa
taggatttgatctctggcct

SEQ ID NO: 6447 - DNA, 20 bp, Sus scrofa
ctaggatttgatctctggcc

SEQ ID NO: 6448 - DNA, 20 bp, Sus scrofa
tgtggctaggatttgatctc

SEQ ID NO: 6449 - DNA, 20 bp, Sus scrofa
ttaaagttgcaactgtggct

SEQ ID NO: 6450 - DNA, 20 bp, Sus scrofa
gagggttaaagttgcaactg

SEQ ID NO: 6451 - DNA, 20 bp, Sus scrofa
gatccctggccaggcacaga

SEQ ID NO: 6452 - DNA, 20 bp, Sus scrofa
tgatccctggccaggcacag

SEQ ID NO: 6453 - DNA, 20 bp, Sus scrofa
caactttaaccctctgtgcc

SEQ ID NO: 6454 - DNA, 20 bp, Sus scrofa
ttaaccctctgtgcctggcc

SEQ ID NO: 6455 - DNA, 20 bp, Sus scrofa
taaccctctgtgcctggcca

SEQ ID NO: 6456 - DNA, 20 bp, Sus scrofa
aggaggtttgatccctggcc

SEQ ID NO: 6457 - DNA, 20 bp, Sus scrofa
tgggaaggaggtttgatccc

SEQ ID NO: 6458 - DNA, 20 bp, Sus scrofa
tcaacagcctcttgggaagg

SEQ ID NO: 6459 - DNA, 20 bp, Sus scrofa
gactcaacagcctcttggga

SEQ ID NO: 6460 - DNA, 20 bp, Sus scrofa
gatcaaacctccttcccaag

SEQ ID NO: 6461 - DNA, 20 bp, Sus scrofa
acaggactcaacagcctctt

SEQ ID NO: 6462 - DNA, 20 bp, Sus scrofa
aacaggactcaacagcctct

SEQ ID NO: 6463 - DNA, 20 bp, Sus scrofa
aattcctgctgtggctcaac

SEQ ID NO: 6464 - DNA, 20 bp, Sus scrofa
gagtcctgttgagccacagc

SEQ ID NO: 6465 - DNA, 20 bp, Sus scrofa
acaaactggaattcctgctg

SEQ ID NO: 6466 - DNA, 20 bp, Sus scrofa
aaacaaacaaacaaacaaac

SEQ ID NO: 6467 - DNA, 20 bp, Sus scrofa
tctttctttttttttacctt

SEQ ID NO: 6468 - DNA, 20 bp, Sus scrofa
ctttctttttttttacctta

SEQ ID NO: 6469 - DNA, 20 bp, Sus scrofa
catgccacggtgcagcccta

SEQ ID NO: 6470 - DNA, 20 bp, Sus scrofa
tttaccttagggctgcaccg

SEQ ID NO: 6471 - DNA, 20 bp, Sus scrofa
ctgggaacctccacatgcca

SEQ ID NO: 6472 - DNA, 20 bp, Sus scrofa
tagggctgcaccgtggcatg

SEQ ID NO: 6473 - DNA, 20 bp, Sus scrofa
ggctgcaccgtggcatgtgg

SEQ ID NO: 6474 - DNA, 20 bp, Sus scrofa
cgtggcatgtggaggttccc

SEQ ID NO: 6475 - DNA, 20 bp, Sus scrofa
caagttgacccctagtacct

SEQ ID NO: 6476 - DNA, 20 bp, Sus scrofa
tgtggaggttcccaggtact

SEQ ID NO: 6477 - DNA, 20 bp, Sus scrofa
ccaagttgacccctagtacc

SEQ ID NO: 6478 - DNA, 20 bp, Sus scrofa
gtggaggttcccaggtacta

SEQ ID NO: 6479 - DNA, 20 bp, Sus scrofa
tggaggttcccaggtactag

SEQ ID NO: 6480 - DNA, 20 bp, Sus scrofa
ccaggtactaggggtcaact

SEQ ID NO: 6481 - DNA, 20 bp, Sus scrofa
tggcacagaatggcagctgc

SEQ ID NO: 6482 - DNA, 20 bp, Sus scrofa
gctgtggttgtggcacagaa

SEQ ID NO: 6483 - DNA, 20 bp, Sus scrofa
atccggagttgctgtggttg

SEQ ID NO: 6484 - DNA, 20 bp, Sus scrofa
gctcagatccggagttgctg

SEQ ID NO: 6485 - DNA, 20 bp, Sus scrofa
tgccacaaccacagcaactc

SEQ ID NO: 6486 - DNA, 20 bp, Sus scrofa
tcacagatgaggctcagatc

SEQ ID NO: 6487 - DNA, 20 bp, Sus scrofa
tgtggtgtagatcacagatg

SEQ ID NO: 6488 - DNA, 20 bp, Sus scrofa
tcatctgtgatctacaccac

SEQ ID NO: 6489 - DNA, 20 bp, Sus scrofa
aacaaacacgctgtgacctg

SEQ ID NO: 6490 - DNA, 20 bp, Sus scrofa
agtacaaagagttcccattg

SEQ ID NO: 6491 - DNA, 20 bp, Sus scrofa
ttaggtagctgagccacaat

SEQ ID NO: 6492 - DNA, 20 bp, Sus scrofa
tttaggtagctgagccacaa

SEQ ID NO: 6493 - DNA, 20 bp, Sus scrofa
tggataccaattgcgttttt

SEQ ID NO: 6494 - DNA, 20 bp, Sus scrofa
cagctacctaaaaacgcaat

SEQ ID NO: 6495 - DNA, 20 bp, Sus scrofa
aaacgcaattggtatccacg

SEQ ID NO: 6496 - DNA, 20 bp, Sus scrofa
ggatcaaacctgcatcctcg

SEQ ID NO: 6497 - DNA, 20 bp, Sus scrofa
attggtatccacgaggatgc

SEQ ID NO: 6498 - DNA, 20 bp, Sus scrofa
gaggatgcaggtttgatcct

SEQ ID NO: 6499 - DNA, 20 bp, Sus scrofa
taagccactgaggtaggcca

SEQ ID NO: 6500 - DNA, 20 bp, Sus scrofa
gatccttaagccactgaggt

SEQ ID NO: 6501 - DNA, 20 bp, Sus scrofa
tgatccttggcctacctcag

SEQ ID NO: 6502 - DNA, 20 bp, Sus scrofa
gacagatccttaagccactg

SEQ ID NO: 6503 - DNA, 20 bp, Sus scrofa
tggcctacctcagtggctta

SEQ ID NO: 6504 - DNA, 20 bp, Sus scrofa
tctgtcattgtcacaagctg

SEQ ID NO: 6505 - DNA, 20 bp, Sus scrofa
attgtcacaagctgtggcat

SEQ ID NO: 6506 - DNA, 20 bp, Sus scrofa
aggtcacagatgatgcagct

SEQ ID NO: 6507 - DNA, 20 bp, Sus scrofa
cagatgatgcagcttggatc

SEQ ID NO: 6508 - DNA, 20 bp, Sus scrofa
gatgcagcttggatctggcg

SEQ ID NO: 6509 - DNA, 20 bp, Sus scrofa
gcttggatctggcgtggctg

SEQ ID NO: 6510 - DNA, 20 bp, Sus scrofa
gatctggcgtggctgtggtg

SEQ ID NO: 6511 - DNA, 20 bp, Sus scrofa
atctggcgtggctgtggtgt

SEQ ID NO: 6512 - DNA, 20 bp, Sus scrofa
tcacaggataggggtggagt

SEQ ID NO: 6513 - DNA, 20 bp, Sus scrofa
ttcacaggataggggtggag

SEQ ID NO: 6514 - DNA, 20 bp, Sus scrofa
tgaagttcacaggatagggg

SEQ ID NO: 6515 - DNA, 20 bp, Sus scrofa
atatgaagttcacaggatag

SEQ ID NO: 6516 - DNA, 20 bp, Sus scrofa
catatgaagttcacaggata

SEQ ID NO: 6517 - DNA, 20 bp, Sus scrofa
gcatatgaagttcacaggat

SEQ ID NO: 6518 - DNA, 20 bp, Sus scrofa
ttgtggcatatgaagttcac

SEQ ID NO: 6519 - DNA, 20 bp, Sus scrofa
cctttttcgggctgcacttg

SEQ ID NO: 6520 - DNA, 20 bp, Sus scrofa
ccacaagtgcagcccgaaaa

SEQ ID NO: 6521 - DNA, 20 bp, Sus scrofa
aatacatgcttagtacagat

SEQ ID NO: 6522 - DNA, 20 bp, Sus scrofa
aagggtgaaggagaatgaca

SEQ ID NO: 6523 - DNA, 20 bp, Sus scrofa
taacctctgggcaagggtga

SEQ ID NO: 6524 - DNA, 20 bp, Sus scrofa
agaaagtaacctctgggcaa

SEQ ID NO: 6525 - DNA, 20 bp, Sus scrofa
gagaaagtaacctctgggca

SEQ ID NO: 6526 - DNA, 20 bp, Sus scrofa
tctccttcacccttgcccag

SEQ ID NO: 6527 - DNA, 20 bp, Sus scrofa
atgctgagaaagtaacctct

SEQ ID NO: 6528 - DNA, 20 bp, Sus scrofa
aatgctgagaaagtaacctc

SEQ ID NO: 6529 - DNA, 20 bp, Sus scrofa
cttctgtagaaagtaggctt

SEQ ID NO: 6530 - DNA, 20 bp, Sus scrofa
acttctgtagaaagtaggct

SEQ ID NO: 6531 - DNA, 20 bp, Sus scrofa
gtggaacttctgtagaaagt

SEQ ID NO: 6532 - DNA, 20 bp, Sus scrofa
cagtttcctcatctgtgaag

SEQ ID NO: 6533 - DNA, 20 bp, Sus scrofa
gaagttccacttcacagatg

SEQ ID NO: 6534 - DNA, 20 bp, Sus scrofa
cttcacagatgaggaaactg

SEQ ID NO: 6535 - DNA, 20 bp, Sus scrofa
gaagttaaataacttgccca

SEQ ID NO: 6536 - DNA, 20 bp, Sus scrofa
cttacaacctgtgtgacctt

SEQ ID NO: 6537 - DNA, 20 bp, Sus scrofa
acttacaacctgtgtgacct

SEQ ID NO: 6538 - DNA, 20 bp, Sus scrofa
taacttgcccaaggtcacac

SEQ ID NO: 6539 - DNA, 20 bp, Sus scrofa
aagtgacaaagcagatagaa

SEQ ID NO: 6540 - DNA, 20 bp, Sus scrofa
cctgctttcaggacgcatac

SEQ ID NO: 6541 - DNA, 20 bp, Sus scrofa
cctgtatgcgtcctgaaagc

SEQ ID NO: 6542 - DNA, 20 bp, Sus scrofa
cctgtctgcgtcctgctttc

SEQ ID NO: 6543 - DNA, 20 bp, Sus scrofa
cctgaaagcaggacgcagac

SEQ ID NO: 6544 - DNA, 20 bp, Sus scrofa
ctgaaagcaggacgcagaca

SEQ ID NO: 6545 - DNA, 20 bp, Sus scrofa
tgaaagcaggacgcagacag

SEQ ID NO: 6546 - DNA, 20 bp, Sus scrofa
aagaagcaagtgagaagttg

SEQ ID NO: 6547 - DNA, 20 bp, Sus scrofa
gtgagaagttgtggtgttat

SEQ ID NO: 6548 - DNA, 20 bp, Sus scrofa
aatctgtttgcttctctaac

SEQ ID NO: 6549 - DNA, 20 bp, Sus scrofa
atctgtttgcttctctaact

SEQ ID NO: 6550 - DNA, 20 bp, Sus scrofa
tctgtttgcttctctaactg

SEQ ID NO: 6551 - DNA, 20 bp, Sus scrofa
ctgtttgcttctctaactgg

SEQ ID NO: 6552 - DNA, 20 bp, Sus scrofa
tgtttgcttctctaactggg

SEQ ID NO: 6553 - DNA, 20 bp, Sus scrofa
ttgcttctctaactgggggg

SEQ ID NO: 6554 - DNA, 20 bp, Sus scrofa
tgcttctctaactgggggga

SEQ ID NO: 6555 - DNA, 20 bp, Sus scrofa
ctctaactggggggagggta

SEQ ID NO: 6556 - DNA, 20 bp, Sus scrofa
taactggggggagggtatgg

SEQ ID NO: 6557 - DNA, 20 bp, Sus scrofa
ctagtaattgctatcatcta

SEQ ID NO: 6558 - DNA, 20 bp, Sus scrofa
aattactagagcagtatcct

SEQ ID NO: 6559 - DNA, 20 bp, Sus scrofa
atcctctcatacaaagtcca

SEQ ID NO: 6560 - DNA, 20 bp, Sus scrofa
atccttggactttgtatgag

SEQ ID NO: 6561 - DNA, 20 bp, Sus scrofa
agttttaaaatgaaaacagg

SEQ ID NO: 6562 - DNA, 20 bp, Sus scrofa
gacagttttaaaatgaaaac

SEQ ID NO: 6563 - DNA, 20 bp, Sus scrofa
aatcaagcatgtataaggga

SEQ ID NO: 6564 - DNA, 20 bp, Sus scrofa
cattaatcaagcatgtataa

SEQ ID NO: 6565 - DNA, 20 bp, Sus scrofa
gcattaatcaagcatgtata

SEQ ID NO: 6566 - DNA, 20 bp, Sus scrofa
attcactgcaagaatgcctt

SEQ ID NO: 6567 - DNA, 20 bp, Sus scrofa
aaattagttttaactgccaa

SEQ ID NO: 6568 - DNA, 20 bp, Sus scrofa
ctactgctgttcttgctctg

SEQ ID NO: 6569 - DNA, 20 bp, Sus scrofa
aacagcagtagagactatca

SEQ ID NO: 6570 - DNA, 20 bp, Sus scrofa
aaaattctcagatatacttt

SEQ ID NO: 6571 - DNA, 20 bp, Sus scrofa
ttctcagatatacttttgga

SEQ ID NO: 6572 - DNA, 20 bp, Sus scrofa
aatattaagatctccaaaga

SEQ ID NO: 6573 - DNA, 20 bp, Sus scrofa
ggccataaaatctccttctt

SEQ ID NO: 6574 - DNA, 20 bp, Sus scrofa
ctccaaagaaggagatttta

SEQ ID NO: 6575 - DNA, 20 bp, Sus scrofa
ttagatattaggttcttttt

SEQ ID NO: 6576 - DNA, 20 bp, Sus scrofa
ggggcaaactgttagatatt

SEQ ID NO: 6577 - DNA, 20 bp, Sus scrofa
tgagaaagctatttctgggg

SEQ ID NO: 6578 - DNA, 20 bp, Sus scrofa
gtgagaaagctatttctggg

SEQ ID NO: 6579 - DNA, 20 bp, Sus scrofa
tgtgagaaagctatttctgg

SEQ ID NO: 6580 - DNA, 20 bp, Sus scrofa
atgtgagaaagctatttctg

SEQ ID NO: 6581 - DNA, 20 bp, Sus scrofa
catgtgagaaagctatttct

SEQ ID NO: 6582 - DNA, 20 bp, Sus scrofa
acatgtgagaaagctatttc

SEQ ID NO: 6583 - DNA, 20 bp, Sus scrofa
ggaaaagatcaagacacagg

SEQ ID NO: 6584 - DNA, 20 bp, Sus scrofa
ttaggaaaagatcaagacac

SEQ ID NO: 6585 - DNA, 20 bp, Sus scrofa
acttagattatcttgatatt

SEQ ID NO: 6586 - DNA, 20 bp, Sus scrofa
aaaattaataaaaccacaag

SEQ ID NO: 6587 - DNA, 20 bp, Sus scrofa
cagctacacatttccacttg

SEQ ID NO: 6588 - DNA, 20 bp, Sus scrofa
cactaagagattttggctac

SEQ ID NO: 6589 - DNA, 20 bp, Sus scrofa
tcaagatcactaagagattt

SEQ ID NO: 6590 - DNA, 20 bp, Sus scrofa
aaatctcttagtgatcttga

SEQ ID NO: 6591 - DNA, 20 bp, Sus scrofa
aatctcttagtgatcttgat

SEQ ID NO: 6592 - DNA, 20 bp, Sus scrofa
gagactgacacaaagaaaag

SEQ ID NO: 6593 - DNA, 20 bp, Sus scrofa
ccaagcctagctcaaggcgc

SEQ ID NO: 6594 - DNA, 20 bp, Sus scrofa
agtctcctgcgccttgagct

SEQ ID NO: 6595 - DNA, 20 bp, Sus scrofa
tttaggccaagcctagctca

SEQ ID NO: 6596 - DNA, 20 bp, Sus scrofa
cctgcgccttgagctaggct

SEQ ID NO: 6597 - DNA, 20 bp, Sus scrofa
tgagctaggcttggcctaaa

SEQ ID NO: 6598 - DNA, 20 bp, Sus scrofa
gagctaggcttggcctaaaa

SEQ ID NO: 6599 - DNA, 20 bp, Sus scrofa
ctctccccagcaaccctttt

SEQ ID NO: 6600 - DNA, 20 bp, Sus scrofa
gcttggcctaaaagggttgc

SEQ ID NO: 6601 - DNA, 20 bp, Sus scrofa
cttggcctaaaagggttgct

SEQ ID NO: 6602 - DNA, 20 bp, Sus scrofa
ttggcctaaaagggttgctg

SEQ ID NO: 6603 - DNA, 20 bp, Sus scrofa
aaaagggttgctggggagag

SEQ ID NO: 6604 - DNA, 20 bp, Sus scrofa
ggttgctggggagagtggtt

SEQ ID NO: 6605 - DNA, 20 bp, Sus scrofa
gttgctggggagagtggttt

SEQ ID NO: 6606 - DNA, 20 bp, Sus scrofa
ctggggagagtggtttggga

SEQ ID NO: 6607 - DNA, 20 bp, Sus scrofa
tggggagagtggtttgggaa

SEQ ID NO: 6608 - DNA, 20 bp, Sus scrofa
ttgtagttaaagctactcct

SEQ ID NO: 6609 - DNA, 20 bp, Sus scrofa
tgtagttaaagctactcctt

SEQ ID NO: 6610 - DNA, 20 bp, Sus scrofa
gtagttaaagctactccttg

SEQ ID NO: 6611 - DNA, 20 bp, Sus scrofa
tttcctaagtctcttcccca

SEQ ID NO: 6612 - DNA, 20 bp, Sus scrofa
actccttggggaagagactt

SEQ ID NO: 6613 - DNA, 20 bp, Sus scrofa
gagacttaggaaaaagaata

SEQ ID NO: 6614 - DNA, 20 bp, Sus scrofa
agacttaggaaaaagaataa

SEQ ID NO: 6615 - DNA, 20 bp, Sus scrofa
gacttaggaaaaagaataag

SEQ ID NO: 6616 - DNA, 20 bp, Sus scrofa
acttaggaaaaagaataagg

SEQ ID NO: 6617 - DNA, 20 bp, Sus scrofa
cttaggaaaaagaataaggg

SEQ ID NO: 6618 - DNA, 20 bp, Sus scrofa
atttcttcacttacatccta

SEQ ID NO: 6619 - DNA, 20 bp, Sus scrofa
agacagaaactatagtcctt

SEQ ID NO: 6620 - DNA, 20 bp, Sus scrofa
aggactatagtttctgtctc

SEQ ID NO: 6621 - DNA, 20 bp, Sus scrofa
atttaaatctttgttgtaca

SEQ ID NO: 6622 - DNA, 20 bp, Sus scrofa
ttctgatagatatcaagggt

SEQ ID NO: 6623 - DNA, 20 bp, Sus scrofa
attctgatagatatcaaggg

SEQ ID NO: 6624 - DNA, 20 bp, Sus scrofa
aatattctgatagatatcaa

SEQ ID NO: 6625 - DNA, 20 bp, Sus scrofa
caatattctgatagatatca

SEQ ID NO: 6626 - DNA, 20 bp, Sus scrofa
tatcagaatattgttactaa

SEQ ID NO: 6627 - DNA, 20 bp, Sus scrofa
cctggctcagctataaataa

SEQ ID NO: 6628 - DNA, 20 bp, Sus scrofa
cctttatttatagctgagcc

SEQ ID NO: 6629 - DNA, 20 bp, Sus scrofa
gggcaggctctacttagacc

SEQ ID NO: 6630 - DNA, 20 bp, Sus scrofa
aactccaaccatataggggc

SEQ ID NO: 6631 - DNA, 20 bp, Sus scrofa
aagtagagcctgcccctata

SEQ ID NO: 6632 - DNA, 20 bp, Sus scrofa
caaaaactccaaccatatag

SEQ ID NO: 6633 - DNA, 20 bp, Sus scrofa
gcaaaaactccaaccatata

SEQ ID NO: 6634 - DNA, 20 bp, Sus scrofa
agcaaaaactccaaccatat

SEQ ID NO: 6635 - DNA, 20 bp, Sus scrofa
agagcctgcccctatatggt

SEQ ID NO: 6636 - DNA, 20 bp, Sus scrofa
tttgttctttgttttctata

SEQ ID NO: 6637 - DNA, 20 bp, Sus scrofa
acctgtgggtgacaaagagg

SEQ ID NO: 6638 - DNA, 20 bp, Sus scrofa
cgaacctgtgggtgacaaag

SEQ ID NO: 6639 - DNA, 20 bp, Sus scrofa
tcctcctctttgtcacccac

SEQ ID NO: 6640 - DNA, 20 bp, Sus scrofa
gcacaagttctcgaacctgt

SEQ ID NO: 6641 - DNA, 20 bp, Sus scrofa
agcacaagttctcgaacctg

SEQ ID NO: 6642 - DNA, 20 bp, Sus scrofa
acaggttcgagaacttgtgc

SEQ ID NO: 6643 - DNA, 20 bp, Sus scrofa
agtaaaagagagaaccattc

SEQ ID NO: 6644 - DNA, 20 bp, Sus scrofa
gtaaaagagagaaccattct

SEQ ID NO: 6645 - DNA, 20 bp, Sus scrofa
taaaagagagaaccattctg

SEQ ID NO: 6646 - DNA, 20 bp, Sus scrofa
tattttccccttccccagaa

SEQ ID NO: 6647 - DNA, 20 bp, Sus scrofa
agagagaaccattctgggga

SEQ ID NO: 6648 - DNA, 20 bp, Sus scrofa
gagagaaccattctggggaa

SEQ ID NO: 6649 - DNA, 20 bp, Sus scrofa
agagaaccattctggggaag

SEQ ID NO: 6650 - DNA, 20 bp, Sus scrofa
aatatatgattctatctgta

SEQ ID NO: 6651 - DNA, 20 bp, Sus scrofa
ttagtgtagcagaaagcgca

SEQ ID NO: 6652 - DNA, 20 bp, Sus scrofa
agcagaaagcgcatggcctt

SEQ ID NO: 6653 - DNA, 20 bp, Sus scrofa
cctgatctgcccagttccaa

SEQ ID NO: 6654 - DNA, 20 bp, Sus scrofa
aagcgcatggcctttggaac

SEQ ID NO: 6655 - DNA, 20 bp, Sus scrofa
agcgcatggcctttggaact

SEQ ID NO: 6656 - DNA, 20 bp, Sus scrofa
cctttggaactgggcagatc

SEQ ID NO: 6657 - DNA, 20 bp, Sus scrofa
ctttggaactgggcagatca

SEQ ID NO: 6658 - DNA, 20 bp, Sus scrofa
catcagggaaatgatagagc

SEQ ID NO: 6659 - DNA, 20 bp, Sus scrofa
cagctctatcatttccctga

SEQ ID NO: 6660 - DNA, 20 bp, Sus scrofa
agctctatcatttccctgat

SEQ ID NO: 6661 - DNA, 20 bp, Sus scrofa
atgcagaagatcacccatca

SEQ ID NO: 6662 - DNA, 20 bp, Sus scrofa
catgcagaagatcacccatc

SEQ ID NO: 6663 - DNA, 20 bp, Sus scrofa
catgttacttaatctctcca

SEQ ID NO: 6664 - DNA, 20 bp, Sus scrofa
caggtgaggaaattgagcct

SEQ ID NO: 6665 - DNA, 20 bp, Sus scrofa
gtatcaccagtttacaggtg

SEQ ID NO: 6666 - DNA, 20 bp, Sus scrofa
caatttcctcacctgtaaac

SEQ ID NO: 6667 - DNA, 20 bp, Sus scrofa
aggtggtatcaccagtttac

SEQ ID NO: 6668 - DNA, 20 bp, Sus scrofa
agccattctggaaggtcagg

SEQ ID NO: 6669 - DNA, 20 bp, Sus scrofa
cacagccattctggaaggtc

SEQ ID NO: 6670 - DNA, 20 bp, Sus scrofa
aacaccacagccattctgga

SEQ ID NO: 6671 - DNA, 20 bp, Sus scrofa
taccacctgaccttccagaa

SEQ ID NO: 6672 - DNA, 20 bp, Sus scrofa
ttcaaacaccacagccattc

SEQ ID NO: 6673 - DNA, 20 bp, Sus scrofa
ctgaccttccagaatggctg

SEQ ID NO: 6674 - DNA, 20 bp, Sus scrofa
aatgctcaataaataaatag

SEQ ID NO: 6675 - DNA, 20 bp, Sus scrofa
ggttatgaagaataattgtt

SEQ ID NO: 6676 - DNA, 20 bp, Sus scrofa
gttatgaagaataattgtta

SEQ ID NO: 6677 - DNA, 20 bp, Sus scrofa
cttttgttcttaatatgctc

SEQ ID NO: 6678 - DNA, 20 bp, Sus scrofa
ttcttaatatgctctggctt

SEQ ID NO: 6679 - DNA, 20 bp, Sus scrofa
tgctctggcttaggaatcac

SEQ ID NO: 6680 - DNA, 20 bp, Sus scrofa
aaaaaaacatgaagagtggg

SEQ ID NO: 6681 - DNA, 20 bp, Sus scrofa
aacaaaaaaacatgaagagt

SEQ ID NO: 6682 - DNA, 20 bp, Sus scrofa
taacaaaaaaacatgaagag

SEQ ID NO: 6683 - DNA, 20 bp, Sus scrofa
ctcttcatgtttttttgtta

SEQ ID NO: 6684 - DNA, 20 bp, Sus scrofa
gaaaagcctttacttaaact

SEQ ID NO: 6685 - DNA, 20 bp, Sus scrofa
ttaaggccaagtttaagtaa

SEQ ID NO: 6686 - DNA, 20 bp, Sus scrofa
cttttcaaatttgtactcca

SEQ ID NO: 6687 - DNA, 20 bp, Sus scrofa
atactgagtttgaaatacca

SEQ ID NO: 6688 - DNA, 20 bp, Sus scrofa
aattgttatttttgcttttt

SEQ ID NO: 6689 - DNA, 20 bp, Sus scrofa
attgttatttttgcttttta

SEQ ID NO: 6690 - DNA, 20 bp, Sus scrofa
gctttttagggccacaccca

SEQ ID NO: 6691 - DNA, 20 bp, Sus scrofa
acctccatgtgccgtgggtg

SEQ ID NO: 6692 - DNA, 20 bp, Sus scrofa
tgggaacctccatgtgccgt

SEQ ID NO: 6693 - DNA, 20 bp, Sus scrofa
ctgggaacctccatgtgccg

SEQ ID NO: 6694 - DNA, 20 bp, Sus scrofa
agggccacacccacggcaca

SEQ ID NO: 6695 - DNA, 20 bp, Sus scrofa
gccacacccacggcacatgg

SEQ ID NO: 6696 - DNA, 20 bp, Sus scrofa
cacggcacatggaggttccc

SEQ ID NO: 6697 - DNA, 20 bp, Sus scrofa
cacatggaggttcccaggct

SEQ ID NO: 6698 - DNA, 20 bp, Sus scrofa
acatggaggttcccaggcta

SEQ ID NO: 6699 - DNA, 20 bp, Sus scrofa
tccgatttgacccctagcct

SEQ ID NO: 6700 - DNA, 20 bp, Sus scrofa
catggaggttcccaggctag

SEQ ID NO: 6701 - DNA, 20 bp, Sus scrofa
ctccgatttgacccctagcc

SEQ ID NO: 6702 - DNA, 20 bp, Sus scrofa
tcccaggctaggggtcaaat

SEQ ID NO: 6703 - DNA, 20 bp, Sus scrofa
ctggctatggtataggctcg

SEQ ID NO: 6704 - DNA, 20 bp, Sus scrofa
cattgtcctggctatggtat

SEQ ID NO: 6705 - DNA, 20 bp, Sus scrofa
cacgagcctataccatagcc

SEQ ID NO: 6706 - DNA, 20 bp, Sus scrofa
atctggcattgtcctggcta

SEQ ID NO: 6707 - DNA, 20 bp, Sus scrofa
ttaaggatctggcattgtcc

SEQ ID NO: 6708 - DNA, 20 bp, Sus scrofa
tgctctgtgggttaaggatc

SEQ ID NO: 6709 - DNA, 20 bp, Sus scrofa
tggccttgctctgtgggtta

SEQ ID NO: 6710 - DNA, 20 bp, Sus scrofa
gatccctggccttgctctgt

SEQ ID NO: 6711 - DNA, 20 bp, Sus scrofa
cgatccctggccttgctctg

SEQ ID NO: 6712 - DNA, 20 bp, Sus scrofa
gatccttaacccacagagca

SEQ ID NO: 6713 - DNA, 20 bp, Sus scrofa
ttaacccacagagcaaggcc

SEQ ID NO: 6714 - DNA, 20 bp, Sus scrofa
taacccacagagcaaggcca

SEQ ID NO: 6715 - DNA, 20 bp, Sus scrofa
gaggatgcaggttcgatccc

SEQ ID NO: 6716 - DNA, 20 bp, Sus scrofa
actagcatccatgaggatgc

SEQ ID NO: 6717 - DNA, 20 bp, Sus scrofa
ggatcgaacctgcatcctca

SEQ ID NO: 6718 - DNA, 20 bp, Sus scrofa
gaatctgactagcatccatg

SEQ ID NO: 6719 - DNA, 20 bp, Sus scrofa
tcgtttctgctgagccacag

SEQ ID NO: 6720 - DNA, 20 bp, Sus scrofa
cgtttctgctgagccacagt

SEQ ID NO: 6721 - DNA, 20 bp, Sus scrofa
ataatggggagttcccactg

SEQ ID NO: 6722 - DNA, 20 bp, Sus scrofa
tcattaagaattacataatg

SEQ ID NO: 6723 - DNA, 20 bp, Sus scrofa
gtcattaagaattacataat

SEQ ID NO: 6724 - DNA, 20 bp, Sus scrofa
agtcattaagaattacataa

SEQ ID NO: 6725 - DNA, 20 bp, Sus scrofa
attatgtaattcttaatgac

SEQ ID NO: 6726 - DNA, 20 bp, Sus scrofa
atgttgttaaaatgaactct

SEQ ID NO: 6727 - DNA, 20 bp, Sus scrofa
atgagctatcaagtaggaca

SEQ ID NO: 6728 - DNA, 20 bp, Sus scrofa
aatgagctatcaagtaggac

SEQ ID NO: 6729 - DNA, 20 bp, Sus scrofa
ctaacaatgagctatcaagt

SEQ ID NO: 6730 - DNA, 20 bp, Sus scrofa
gctcattgttagtgctttat

SEQ ID NO: 6731 - DNA, 20 bp, Sus scrofa
ttgggtgagggggaggttga

SEQ ID NO: 6732 - DNA, 20 bp, Sus scrofa
atgttttttgggtgaggggg

SEQ ID NO: 6733 - DNA, 20 bp, Sus scrofa
aacatgttttttgggtgagg

SEQ ID NO: 6734 - DNA, 20 bp, Sus scrofa
aaacatgttttttgggtgag

SEQ ID NO: 6735 - DNA, 20 bp, Sus scrofa
aaaacatgttttttgggtga

SEQ ID NO: 6736 - DNA, 20 bp, Sus scrofa
aaaaacatgttttttgggtg

SEQ ID NO: 6737 - DNA, 20 bp, Sus scrofa
atgaaaaaaacatgtttttt

SEQ ID NO: 6738 - DNA, 20 bp, Sus scrofa
catgaaaaaaacatgttttt

SEQ ID NO: 6739 - DNA, 20 bp, Sus scrofa
ctgtgacaggtaaatgtgca

SEQ ID NO: 6740 - DNA, 20 bp, Sus scrofa
catactgggggctctgtgac

SEQ ID NO: 6741 - DNA, 20 bp, Sus scrofa
ttccacttctgacatactgg

SEQ ID NO: 6742 - DNA, 20 bp, Sus scrofa
cttccacttctgacatactg

SEQ ID NO: 6743 - DNA, 20 bp, Sus scrofa
tcttccacttctgacatact

SEQ ID NO: 6744 - DNA, 20 bp, Sus scrofa
ttcttccacttctgacatac

SEQ ID NO: 6745 - DNA, 20 bp, Sus scrofa
agcccccagtatgtcagaag

SEQ ID NO: 6746 - DNA, 20 bp, Sus scrofa
tggaagaaacttatatcttg

SEQ ID NO: 6747 - DNA, 20 bp, Sus scrofa
aaacttatatcttgtggcct

SEQ ID NO: 6748 - DNA, 20 bp, Sus scrofa
tgcctataaaacaaaggccg

SEQ ID NO: 6749 - DNA, 20 bp, Sus scrofa
ctactgtgcctataaaacaa

SEQ ID NO: 6750 - DNA, 20 bp, Sus scrofa
ggcctcggcctttgttttat

SEQ ID NO: 6751 - DNA, 20 bp, Sus scrofa
gcacagtagtagatccagaa

SEQ ID NO: 6752 - DNA, 20 bp, Sus scrofa
ggcaaattaccatacctttc

SEQ ID NO: 6753 - DNA, 20 bp, Sus scrofa
gtagtagatccagaaaggta

SEQ ID NO: 6754 - DNA, 20 bp, Sus scrofa
ccactttcgtgagtggcttt

SEQ ID NO: 6755 - DNA, 20 bp, Sus scrofa
ctactaaccactttcgtgag

SEQ ID NO: 6756 - DNA, 20 bp, Sus scrofa
cctaaagccactcacgaaag

SEQ ID NO: 6757 - DNA, 20 bp, Sus scrofa
gaagatatgagctctaattc

SEQ ID NO: 6758 - DNA, 20 bp, Sus scrofa
ctgccaatggaaaaggtact

SEQ ID NO: 6759 - DNA, 20 bp, Sus scrofa
actgccaatggaaaaggtac

SEQ ID NO: 6760 - DNA, 20 bp, Sus scrofa
tgcaacactgccaatggaaa

SEQ ID NO: 6761 - DNA, 20 bp, Sus scrofa
taacccagtaccttttccat

SEQ ID NO: 6762 - DNA, 20 bp, Sus scrofa
gaattctgcaacactgccaa

SEQ ID NO: 6763 - DNA, 20 bp, Sus scrofa
tacagagatgaggtaaacag

SEQ ID NO: 6764 - DNA, 20 bp, Sus scrofa
aactccctgatacagagatg

SEQ ID NO: 6765 - DNA, 20 bp, Sus scrofa
gtttacctcatctctgtatc

SEQ ID NO: 6766 - DNA, 20 bp, Sus scrofa
tttacctcatctctgtatca

SEQ ID NO: 6767 - DNA, 20 bp, Sus scrofa
gcgtatcttttttagattaa

SEQ ID NO: 6768 - DNA, 20 bp, Sus scrofa
agaaatctgaagtcaaattt

SEQ ID NO: 6769 - DNA, 20 bp, Sus scrofa
aggaacagcttacttgtctt

SEQ ID NO: 6770 - DNA, 20 bp, Sus scrofa
gattcaagcaggcaggctat

SEQ ID NO: 6771 - DNA, 20 bp, Sus scrofa
ctctcgggattcaagcaggc

SEQ ID NO: 6772 - DNA, 20 bp, Sus scrofa
gtccctctcgggattcaagc

SEQ ID NO: 6773 - DNA, 20 bp, Sus scrofa
ctgcctgcttgaatcccgag

SEQ ID NO: 6774 - DNA, 20 bp, Sus scrofa
tgcctgcttgaatcccgaga

SEQ ID NO: 6775 - DNA, 20 bp, Sus scrofa
accaaaaaaaagtccctctc

SEQ ID NO: 6776 - DNA, 20 bp, Sus scrofa
aaccaaaaaaaagtccctct

SEQ ID NO: 6777 - DNA, 20 bp, Sus scrofa
tcccgagagggacttttttt

SEQ ID NO: 6778 - DNA, 20 bp, Sus scrofa
aagtatatgaattaaaaatc

SEQ ID NO: 6779 - DNA, 20 bp, Sus scrofa
tatgaattaaaaatcaggag

SEQ ID NO: 6780 - DNA, 20 bp, Sus scrofa
atgaattaaaaatcaggagt

SEQ ID NO: 6781 - DNA, 20 bp, Sus scrofa
tgtttccgcttcgtcatgat

SEQ ID NO: 6782 - DNA, 20 bp, Sus scrofa
ttgtttccgcttcgtcatga

SEQ ID NO: 6783 - DNA, 20 bp, Sus scrofa
gagttcccatcatgacgaag

SEQ ID NO: 6784 - DNA, 20 bp, Sus scrofa
aagcggaaacaaatccgact

SEQ ID NO: 6785 - DNA, 20 bp, Sus scrofa
gcaacctcatggttcctagt

SEQ ID NO: 6786 - DNA, 20 bp, Sus scrofa
aaatccgactaggaaccatg

SEQ ID NO: 6787 - DNA, 20 bp, Sus scrofa
ggatggaacccgcaacctca

SEQ ID NO: 6788 - DNA, 20 bp, Sus scrofa
gactaggaaccatgaggttg

SEQ ID NO: 6789 - DNA, 20 bp, Sus scrofa
actaggaaccatgaggttgc

SEQ ID NO: 6790 - DNA, 20 bp, Sus scrofa
gaggttgcgggttccatccc

SEQ ID NO: 6791 - DNA, 20 bp, Sus scrofa
ccactgacagaggccaggga

SEQ ID NO: 6792 - DNA, 20 bp, Sus scrofa
taatccactgacagaggcca

SEQ ID NO: 6793 - DNA, 20 bp, Sus scrofa
ttaatccactgacagaggcc

SEQ ID NO: 6794 - DNA, 20 bp, Sus scrofa
gatccttaatccactgacag

SEQ ID NO: 6795 - DNA, 20 bp, Sus scrofa
ccatccctggcctctgtcag

SEQ ID NO: 6796 - DNA, 20 bp, Sus scrofa
tggcctctgtcagtggatta

SEQ ID NO: 6797 - DNA, 20 bp, Sus scrofa
ctgtcagtggattaaggatc

SEQ ID NO: 6798 - DNA, 20 bp, Sus scrofa
gcaacatacaccacagctca

SEQ ID NO: 6799 - DNA, 20 bp, Sus scrofa
tctggcgttgccgtgagctg

SEQ ID NO: 6800 - DNA, 20 bp, Sus scrofa
gccatacccacggcacatgg

SEQ ID NO: 6801 - DNA, 20 bp, Sus scrofa
agggccatacccacggcaca

SEQ ID NO: 6802 - DNA, 20 bp, Sus scrofa
agatgaacctccatgtgccg

SEQ ID NO: 6803 - DNA, 20 bp, Sus scrofa
gatgaacctccatgtgccgt

SEQ ID NO: 6804 - DNA, 20 bp, Sus scrofa
acctccatgtgccgtgggta

SEQ ID NO: 6805 - DNA, 20 bp, Sus scrofa
gctttttagggccataccca

SEQ ID NO: 6806 - DNA, 20 bp, Sus scrofa
aagaaaaaagaaacaggttc

SEQ ID NO: 6807 - DNA, 20 bp, Sus scrofa
agaaaaaagaaacaggttct

SEQ ID NO: 6808 - DNA, 20 bp, Sus scrofa
acaggttctgggagaaattt

SEQ ID NO: 6809 - DNA, 20 bp, Sus scrofa
tgaaatcaatgtttaaattt

SEQ ID NO: 6810 - DNA, 20 bp, Sus scrofa
cagtttgccaaagcatttag

SEQ ID NO: 6811 - DNA, 20 bp, Sus scrofa
aaatatgccactaaatgctt

SEQ ID NO: 6812 - DNA, 20 bp, Sus scrofa
cttaaggagtagggacagca

SEQ ID NO: 6813 - DNA, 20 bp, Sus scrofa
cacaaatatcttaaggagta

SEQ ID NO: 6814 - DNA, 20 bp, Sus scrofa
acacaaatatcttaaggagt

SEQ ID NO: 6815 - DNA, 20 bp, Sus scrofa
ctttcaacacaaatatctta

SEQ ID NO: 6816 - DNA, 20 bp, Sus scrofa
cttaagatatttgtgttgaa

SEQ ID NO: 6817 - DNA, 20 bp, Sus scrofa
aaaatagagaccatttctct

SEQ ID NO: 6818 - DNA, 20 bp, Sus scrofa
attctaacaaccaagagaaa

SEQ ID NO: 6819 - DNA, 20 bp, Sus scrofa
aagtgttattagctttacac

SEQ ID NO: 6820 - DNA, 20 bp, Sus scrofa
aataacacttgtgtctttgt

SEQ ID NO: 6821 - DNA, 20 bp, Sus scrofa
tccaataaaagatctaactg

SEQ ID NO: 6822 - DNA, 20 bp, Sus scrofa
accacagttagatcttttat

SEQ ID NO: 6823 - DNA, 20 bp, Sus scrofa
cttttattggactatcccat

SEQ ID NO: 6824 - DNA, 20 bp, Sus scrofa
tattggactatcccattgga

SEQ ID NO: 6825 - DNA, 20 bp, Sus scrofa
aacttttttttccttccaat

SEQ ID NO: 6826 - DNA, 20 bp, Sus scrofa
aaacttttttttccttccaa

SEQ ID NO: 6827 - DNA, 20 bp, Sus scrofa
aaaaaagtaagtctgctgct

SEQ ID NO: 6828 - DNA, 20 bp, Sus scrofa
cttactttttttgttgttgt

SEQ ID NO: 6829 - DNA, 20 bp, Sus scrofa
gttttttgtttgcttttttt

SEQ ID NO: 6830 - DNA, 20 bp, Sus scrofa
ttttttgtttgcttttttta

SEQ ID NO: 6831 - DNA, 20 bp, Sus scrofa
tgcgaacttctatatggtgc

SEQ ID NO: 6832 - DNA, 20 bp, Sus scrofa
ctagcctgcgaacttctata

SEQ ID NO: 6833 - DNA, 20 bp, Sus scrofa
tgcaccatatagaagttcgc

SEQ ID NO: 6834 - DNA, 20 bp, Sus scrofa
catatagaagttcgcaggct

SEQ ID NO: 6835 - DNA, 20 bp, Sus scrofa
atatagaagttcgcaggcta

SEQ ID NO: 6836 - DNA, 20 bp, Sus scrofa
ttgctgtggcgtacgtaggt

SEQ ID NO: 6837 - DNA, 20 bp, Sus scrofa
ggtgttgctgtggcgtacgt

SEQ ID NO: 6838 - DNA, 20 bp, Sus scrofa
actcagatcaggtgttgctg

SEQ ID NO: 6839 - DNA, 20 bp, Sus scrofa
tcacagatgtgactcagatc

SEQ ID NO: 6840 - DNA, 20 bp, Sus scrofa
attgccaagagctacagcgt

SEQ ID NO: 6841 - DNA, 20 bp, Sus scrofa
gtgacctacgctgtagctct

SEQ ID NO: 6842 - DNA, 20 bp, Sus scrofa
cactcactgggttaaggatc

SEQ ID NO: 6843 - DNA, 20 bp, Sus scrofa
tggcatcactcactgggtta

SEQ ID NO: 6844 - DNA, 20 bp, Sus scrofa
aatctctggcatcactcact

SEQ ID NO: 6845 - DNA, 20 bp, Sus scrofa
caatctctggcatcactcac

SEQ ID NO: 6846 - DNA, 20 bp, Sus scrofa
gaggatgtgggttcaatctc

SEQ ID NO: 6847 - DNA, 20 bp, Sus scrofa
actagtatccatgaggatgt

SEQ ID NO: 6848 - DNA, 20 bp, Sus scrofa
aactagtatccatgaggatg

SEQ ID NO: 6849 - DNA, 20 bp, Sus scrofa
agattgaacccacatcctca

SEQ ID NO: 6850 - DNA, 20 bp, Sus scrofa
gaacccaactagtatccatg

SEQ ID NO: 6851 - DNA, 20 bp, Sus scrofa
acatcctcatggatactagt

SEQ ID NO: 6852 - DNA, 20 bp, Sus scrofa
catcctcatggatactagtt

SEQ ID NO: 6853 - DNA, 20 bp, Sus scrofa
agttcctgttgtggctcagc

SEQ ID NO: 6854 - DNA, 20 bp, Sus scrofa
ttaacctgctgagccacaac

SEQ ID NO: 6855 - DNA, 20 bp, Sus scrofa
aaatctgggagttcctgttg

SEQ ID NO: 6856 - DNA, 20 bp, Sus scrofa
gtttaaaaaacagtaaatct

SEQ ID NO: 6857 - DNA, 20 bp, Sus scrofa
agtttaaaaaacagtaaatc

SEQ ID NO: 6858 - DNA, 20 bp, Sus scrofa
aaatgaactacatgatgcag

SEQ ID NO: 6859 - DNA, 20 bp, Sus scrofa
aaaacttacatgatttagtt

SEQ ID NO: 6860 - DNA, 20 bp, Sus scrofa
gaaaacttacatgatttagt

SEQ ID NO: 6861 - DNA, 20 bp, Sus scrofa
atagctgttacagtgataaa

SEQ ID NO: 6862 - DNA, 20 bp, Sus scrofa
ctgtaacagctatgtaatct

SEQ ID NO: 6863 - DNA, 20 bp, Sus scrofa
tgtaacagctatgtaatctt

SEQ ID NO: 6864 - DNA, 20 bp, Sus scrofa
atcacccctatttacagaaa

SEQ ID NO: 6865 - DNA, 20 bp, Sus scrofa
cattttccttttctgtaaat

SEQ ID NO: 6866 - DNA, 20 bp, Sus scrofa
attttccttttctgtaaata

SEQ ID NO: 6867 - DNA, 20 bp, Sus scrofa
ttttccttttctgtaaatag

SEQ ID NO: 6868 - DNA, 20 bp, Sus scrofa
gataattctacttgctccgt

SEQ ID NO: 6869 - DNA, 20 bp, Sus scrofa
tgatctcacagtaaatccta

SEQ ID NO: 6870 - DNA, 20 bp, Sus scrofa
actaagtacccaagtgctta

SEQ ID NO: 6871 - DNA, 20 bp, Sus scrofa
tgaatagtgccttaagcact

SEQ ID NO: 6872 - DNA, 20 bp, Sus scrofa
gaatagtgccttaagcactt

SEQ ID NO: 6873 - DNA, 20 bp, Sus scrofa
agtacttaagtactgtgtaa

SEQ ID NO: 6874 - DNA, 20 bp, Sus scrofa
tactgtgtaaaggttagata

SEQ ID NO: 6875 - DNA, 20 bp, Sus scrofa
gatacggttactgttgttgt

SEQ ID NO: 6876 - DNA, 20 bp, Sus scrofa
taaaattgaaactagctata

SEQ ID NO: 6877 - DNA, 20 bp, Sus scrofa
ttttgcagatacgaaaacta

SEQ ID NO: 6878 - DNA, 20 bp, Sus scrofa
tgaagcgtggaaaaataaga

SEQ ID NO: 6879 - DNA, 20 bp, Sus scrofa
gagtaaaagaaactgaagcg

SEQ ID NO: 6880 - DNA, 20 bp, Sus scrofa
cttaagattcacatattcct

SEQ ID NO: 6881 - DNA, 20 bp, Sus scrofa
attcacatattccttggtga

SEQ ID NO: 6882 - DNA, 20 bp, Sus scrofa
gaaggaacgaaccttcacca

SEQ ID NO: 6883 - DNA, 20 bp, Sus scrofa
ggcaactggtctgtcaatga

SEQ ID NO: 6884 - DNA, 20 bp, Sus scrofa
cgatcaagcagcacggcaac

SEQ ID NO: 6885 - DNA, 20 bp, Sus scrofa
tagctgccgatcaagcagca

SEQ ID NO: 6886 - DNA, 20 bp, Sus scrofa
cagttgccgtgctgcttgat

SEQ ID NO: 6887 - DNA, 20 bp, Sus scrofa
ggcagctaagaaattagagt

SEQ ID NO: 6888 - DNA, 20 bp, Sus scrofa
attagagtaggttcttaaaa

SEQ ID NO: 6889 - DNA, 20 bp, Sus scrofa
ggatactttttgcacaaact

SEQ ID NO: 6890 - DNA, 20 bp, Sus scrofa
tgtgcaaaaagtatcctctg

SEQ ID NO: 6891 - DNA, 20 bp, Sus scrofa
tgacaaaaccaactcctcag

SEQ ID NO: 6892 - DNA, 20 bp, Sus scrofa
aaaagtatcctctgaggagt

SEQ ID NO: 6893 - DNA, 20 bp, Sus scrofa
agaaaagggagtggggcaat

SEQ ID NO: 6894 - DNA, 20 bp, Sus scrofa
ttacctcagaaaagggagtg

SEQ ID NO: 6895 - DNA, 20 bp, Sus scrofa
attacctcagaaaagggagt

SEQ ID NO: 6896 - DNA, 20 bp, Sus scrofa
cattacctcagaaaagggag

SEQ ID NO: 6897 - DNA, 20 bp, Sus scrofa
agctccattacctcagaaaa

SEQ ID NO: 6898 - DNA, 20 bp, Sus scrofa
ttgccccactcccttttctg

SEQ ID NO: 6899 - DNA, 20 bp, Sus scrofa
aagctccattacctcagaaa

SEQ ID NO: 6900 - DNA, 20 bp, Sus scrofa
cactcccttttctgaggtaa

SEQ ID NO: 6901 - DNA, 20 bp, Sus scrofa
aggtaatggagcttctttaa

SEQ ID NO: 6902 - DNA, 20 bp, Sus scrofa
tgccctgaaagctatgggaa

SEQ ID NO: 6903 - DNA, 20 bp, Sus scrofa
aatgctgccctgaaagctat

SEQ ID NO: 6904 - DNA, 20 bp, Sus scrofa
aaatgctgccctgaaagcta

SEQ ID NO: 6905 - DNA, 20 bp, Sus scrofa
gtaccattcccatagctttc

SEQ ID NO: 6906 - DNA, 20 bp, Sus scrofa
taccattcccatagctttca

SEQ ID NO: 6907 - DNA, 20 bp, Sus scrofa
agctttcagggcagcatttc

SEQ ID NO: 6908 - DNA, 20 bp, Sus scrofa
ttgccatggggttctacatc

SEQ ID NO: 6909 - DNA, 20 bp, Sus scrofa
cttccagatgtagaacccca

SEQ ID NO: 6910 - DNA, 20 bp, Sus scrofa
tacagtgctgacttgccatg

SEQ ID NO: 6911 - DNA, 20 bp, Sus scrofa
gtacagtgctgacttgccat

SEQ ID NO: 6912 - DNA, 20 bp, Sus scrofa
tgtacagtgctgacttgcca

SEQ ID NO: 6913 - DNA, 20 bp, Sus scrofa
gcactgtacagaaccagatt

SEQ ID NO: 6914 - DNA, 20 bp, Sus scrofa
tgcccacttgaaacctaatc

SEQ ID NO: 6915 - DNA, 20 bp, Sus scrofa
gaaccagattaggtttcaag

SEQ ID NO: 6916 - DNA, 20 bp, Sus scrofa
aaccagattaggtttcaagt

SEQ ID NO: 6917 - DNA, 20 bp, Sus scrofa
tgggcattgtgagctttgct

SEQ ID NO: 6918 - DNA, 20 bp, Sus scrofa
tacctgccaagaagggtaaa

SEQ ID NO: 6919 - DNA, 20 bp, Sus scrofa
cacagaccatttacccttct

SEQ ID NO: 6920 - DNA, 20 bp, Sus scrofa
tattcgatacctgccaagaa

SEQ ID NO: 6921 - DNA, 20 bp, Sus scrofa
atattcgatacctgccaaga

SEQ ID NO: 6922 - DNA, 20 bp, Sus scrofa
gaccatttacccttcttggc

SEQ ID NO: 6923 - DNA, 20 bp, Sus scrofa
cattttctaacctaaaaagt

SEQ ID NO: 6924 - DNA, 20 bp, Sus scrofa
tttgctttgacccacttttt

SEQ ID NO: 6925 - DNA, 20 bp, Sus scrofa
acattttctaacctaaaaag

SEQ ID NO: 6926 - DNA, 20 bp, Sus scrofa
aaaatgtattcactgatatt

SEQ ID NO: 6927 - DNA, 20 bp, Sus scrofa
aaatgtattcactgatatta

SEQ ID NO: 6928 - DNA, 20 bp, Sus scrofa
tgctaattagaacactttgc

SEQ ID NO: 6929 - DNA, 20 bp, Sus scrofa
aaagtgttctaattagcagc

SEQ ID NO: 6930 - DNA, 20 bp, Sus scrofa
tccccagaacactttgggga

SEQ ID NO: 6931 - DNA, 20 bp, Sus scrofa
cagatccccagaacactttg

SEQ ID NO: 6932 - DNA, 20 bp, Sus scrofa
acagatccccagaacacttt

SEQ ID NO: 6933 - DNA, 20 bp, Sus scrofa
tacagatccccagaacactt

SEQ ID NO: 6934 - DNA, 20 bp, Sus scrofa
tctccttccccaaagtgttc

SEQ ID NO: 6935 - DNA, 20 bp, Sus scrofa
ctccttccccaaagtgttct

SEQ ID NO: 6936 - DNA, 20 bp, Sus scrofa
tccttccccaaagtgttctg

SEQ ID NO: 6937 - DNA, 20 bp, Sus scrofa
tggggatctgtaaacttatt

SEQ ID NO: 6938 - DNA, 20 bp, Sus scrofa
ggggatctgtaaacttattt

SEQ ID NO: 6939 - DNA, 20 bp, Sus scrofa
atgatctctattttttatta

SEQ ID NO: 6940 - DNA, 20 bp, Sus scrofa
aatgatctctattttttatt

SEQ ID NO: 6941 - DNA, 20 bp, Sus scrofa
aaatagagatcatttgatct

SEQ ID NO: 6942 - DNA, 20 bp, Sus scrofa
agagatcatttgatcttggt

SEQ ID NO: 6943 - DNA, 20 bp, Sus scrofa
ttggtgtttaagaactatat

SEQ ID NO: 6944 - DNA, 20 bp, Sus scrofa
aaaagaaacacatatcatta

SEQ ID NO: 6945 - DNA, 20 bp, Sus scrofa
gttaaagggaaaaatgcaca

SEQ ID NO: 6946 - DNA, 20 bp, Sus scrofa
actgagctcaagctgttaaa

SEQ ID NO: 6947 - DNA, 20 bp, Sus scrofa
cactgagctcaagctgttaa

SEQ ID NO: 6948 - DNA, 20 bp, Sus scrofa
ctcacacatctaaacttaag

SEQ ID NO: 6949 - DNA, 20 bp, Sus scrofa
actgaaagatatcagcaccc

SEQ ID NO: 6950 - DNA, 20 bp, Sus scrofa
tatcagcaccctggaacctt

SEQ ID NO: 6951 - DNA, 20 bp, Sus scrofa
ttggtaagtagttgagaatt

SEQ ID NO: 6952 - DNA, 20 bp, Sus scrofa
tagttgagaatttggaaaac

SEQ ID NO: 6953 - DNA, 20 bp, Sus scrofa
atttggaaaacaggactttc

SEQ ID NO: 6954 - DNA, 20 bp, Sus scrofa
ttcattttcatatttcttta

SEQ ID NO: 6955 - DNA, 20 bp, Sus scrofa
tttcatatttctttatggtg

SEQ ID NO: 6956 - DNA, 20 bp, Sus scrofa
ttcatatttctttatggtga

SEQ ID NO: 6957 - DNA, 20 bp, Sus scrofa
gaaataattgaaagttataa

SEQ ID NO: 6958 - DNA, 20 bp, Sus scrofa
gaaagttataatggagaaag

SEQ ID NO: 6959 - DNA, 20 bp, Sus scrofa
gaggctctgatctttaaaac

SEQ ID NO: 6960 - DNA, 20 bp, Sus scrofa
acaggaacacataactagtg

SEQ ID NO: 6961 - DNA, 20 bp, Sus scrofa
tcactagttatgtgttcctg

SEQ ID NO: 6962 - DNA, 20 bp, Sus scrofa
gaaagggagagtaatgccac

SEQ ID NO: 6963 - DNA, 20 bp, Sus scrofa
gccaccataataatcagaaa

SEQ ID NO: 6964 - DNA, 20 bp, Sus scrofa
agccaccataataatcagaa

SEQ ID NO: 6965 - DNA, 20 bp, Sus scrofa
ctctccctttctgattatta

SEQ ID NO: 6966 - DNA, 20 bp, Sus scrofa
tccctttctgattattatgg

SEQ ID NO: 6967 - DNA, 20 bp, Sus scrofa
acaaaagaaaagcattttga

SEQ ID NO: 6968 - DNA, 20 bp, Sus scrofa
agtcaatatgacatttaaaa

SEQ ID NO: 6969 - DNA, 20 bp, Sus scrofa
aatttgaagatggatgttta

SEQ ID NO: 6970 - DNA, 20 bp, Sus scrofa
ctggggaaaaaatttgaaga

SEQ ID NO: 6971 - DNA, 20 bp, Sus scrofa
ttcaaattttttccccagac

SEQ ID NO: 6972 - DNA, 20 bp, Sus scrofa
agaacagcctggccagtctg

SEQ ID NO: 6973 - DNA, 20 bp, Sus scrofa
cagaacagcctggccagtct

SEQ ID NO: 6974 - DNA, 20 bp, Sus scrofa
acagaacagcctggccagtc

SEQ ID NO: 6975 - DNA, 20 bp, Sus scrofa
attttttccccagactggcc

SEQ ID NO: 6976 - DNA, 20 bp, Sus scrofa
tacaaaagtacagaacagcc

SEQ ID NO: 6977 - DNA, 20 bp, Sus scrofa
acttttgtacttttccaaaa

SEQ ID NO: 6978 - DNA, 20 bp, Sus scrofa
cccaacataaacagcctttt

SEQ ID NO: 6979 - DNA, 20 bp, Sus scrofa
tccaaaaaggctgtttatgt

SEQ ID NO: 6980 - DNA, 20 bp, Sus scrofa
ccaaaaaggctgtttatgtt

SEQ ID NO: 6981 - DNA, 20 bp, Sus scrofa
aaaaggctgtttatgttggg

SEQ ID NO: 6982 - DNA, 20 bp, Sus scrofa
gtggcatatctgactgtaga

SEQ ID NO: 6983 - DNA, 20 bp, Sus scrofa
actgtagaaggtaccatcca

SEQ ID NO: 6984 - DNA, 20 bp, Sus scrofa
ctgtagaaggtaccatccaa

SEQ ID NO: 6985 - DNA, 20 bp, Sus scrofa
tcactggagctgcccttgga

SEQ ID NO: 6986 - DNA, 20 bp, Sus scrofa
aaactcactggagctgccct

SEQ ID NO: 6987 - DNA, 20 bp, Sus scrofa
ttaaaaggcctaaaactcac

SEQ ID NO: 6988 - DNA, 20 bp, Sus scrofa
gggcagctccagtgagtttt

SEQ ID NO: 6989 - DNA, 20 bp, Sus scrofa
gcacaagatcatgaattaaa

SEQ ID NO: 6990 - DNA, 20 bp, Sus scrofa
tcatgatcttgtgctctagc

SEQ ID NO: 6991 - DNA, 20 bp, Sus scrofa
gggttcccatgcaaaacttt

SEQ ID NO: 6992 - DNA, 20 bp, Sus scrofa
ttgttgcctaaagttttgca

SEQ ID NO: 6993 - DNA, 20 bp, Sus scrofa
tgttgcctaaagttttgcat

SEQ ID NO: 6994 - DNA, 20 bp, Sus scrofa
ggactaagaggagaatttag

SEQ ID NO: 6995 - DNA, 20 bp, Sus scrofa
aggactaagaggagaattta

SEQ ID NO: 6996 - DNA, 20 bp, Sus scrofa
caggactaagaggagaattt

SEQ ID NO: 6997 - DNA, 20 bp, Sus scrofa
cagcttattccaggactaag

SEQ ID NO: 6998 - DNA, 20 bp, Sus scrofa
ctaaattctcctcttagtcc

SEQ ID NO: 6999 - DNA, 20 bp, Sus scrofa
aaccttccacagcttattcc

SEQ ID NO: 7000 - DNA, 20 bp, Sus scrofa
cttagtcctggaataagctg

SEQ ID NO: 7001 - DNA, 20 bp, Sus scrofa
gtcctggaataagctgtgga

SEQ ID NO: 7002 - DNA, 20 bp, Sus scrofa
ggttaagtttaagtgctact

SEQ ID NO: 7003 - DNA, 20 bp, Sus scrofa
gttaagtttaagtgctactt

SEQ ID NO: 7004 - DNA, 20 bp, Sus scrofa
acagacttgctgtgtgacct

SEQ ID NO: 7005 - DNA, 20 bp, Sus scrofa
cagacttgctgtgtgacctt

SEQ ID NO: 7006 - DNA, 20 bp, Sus scrofa
gagaagaagcaatttgccca

SEQ ID NO: 7007 - DNA, 20 bp, Sus scrofa
ggcaaattgcttcttctctc

SEQ ID NO: 7008 - DNA, 20 bp, Sus scrofa
gcaaattgcttcttctctct

SEQ ID NO: 7009 - DNA, 20 bp, Sus scrofa
cttcataagtgaggaaactg

SEQ ID NO: 7010 - DNA, 20 bp, Sus scrofa
tcctttctgcttcataagtg

SEQ ID NO: 7011 - DNA, 20 bp, Sus scrofa
tcctcacttatgaagcagaa

SEQ ID NO: 7012 - DNA, 20 bp, Sus scrofa
gaattcctaagaagtaaggc

SEQ ID NO: 7013 - DNA, 20 bp, Sus scrofa
ctcagaattcctaagaagta

SEQ ID NO: 7014 - DNA, 20 bp, Sus scrofa
ataatcctgccttacttctt

SEQ ID NO: 7015 - DNA, 20 bp, Sus scrofa
aggaattctgagagtaaaat

SEQ ID NO: 7016 - DNA, 20 bp, Sus scrofa
gcttcccaacttacaaagca

SEQ ID NO: 7017 - DNA, 20 bp, Sus scrofa
atttaccttgctttgtaagt

SEQ ID NO: 7018 - DNA, 20 bp, Sus scrofa
tttaccttgctttgtaagtt

SEQ ID NO: 7019 - DNA, 20 bp, Sus scrofa
agttgggaagctaagctaat

SEQ ID NO: 7020 - DNA, 20 bp, Sus scrofa
gttgggaagctaagctaatt

SEQ ID NO: 7021 - DNA, 20 bp, Sus scrofa
ttgggaagctaagctaattg

SEQ ID NO: 7022 - DNA, 20 bp, Sus scrofa
tgggaagctaagctaattgg

SEQ ID NO: 7023 - DNA, 20 bp, Sus scrofa
aattgggggtttagtccatg

SEQ ID NO: 7024 - DNA, 20 bp, Sus scrofa
ggccacttgtaacttccaca

SEQ ID NO: 7025 - DNA, 20 bp, Sus scrofa
gtccatgtggaagttacaag

SEQ ID NO: 7026 - DNA, 20 bp, Sus scrofa
tgccttctgaagctcttttc

SEQ ID NO: 7027 - DNA, 20 bp, Sus scrofa
ggccagaaaagagcttcaga

SEQ ID NO: 7028 - DNA, 20 bp, Sus scrofa
gaaaagagcttcagaaggca

SEQ ID NO: 7029 - DNA, 20 bp, Sus scrofa
aaaagagcttcagaaggcaa

SEQ ID NO: 7030 - DNA, 20 bp, Sus scrofa
ggcaagggttcatgcagagt

SEQ ID NO: 7031 - DNA, 20 bp, Sus scrofa
gcaagggttcatgcagagta

SEQ ID NO: 7032 - DNA, 20 bp, Sus scrofa
caagggttcatgcagagtag

SEQ ID NO: 7033 - DNA, 20 bp, Sus scrofa
aagggttcatgcagagtagg

SEQ ID NO: 7034 - DNA, 20 bp, Sus scrofa
tcatgcagagtagggggctt

SEQ ID NO: 7035 - DNA, 20 bp, Sus scrofa
gaaatcacggaattttcagg

SEQ ID NO: 7036 - DNA, 20 bp, Sus scrofa
cttgaaatcacggaattttc

SEQ ID NO: 7037 - DNA, 20 bp, Sus scrofa
atttaacaatcttgaaatca

SEQ ID NO: 7038 - DNA, 20 bp, Sus scrofa
acaagaatgtcatatttagg

SEQ ID NO: 7039 - DNA, 20 bp, Sus scrofa
gacaagaatgtcatatttag

SEQ ID NO: 7040 - DNA, 20 bp, Sus scrofa
agacaagaatgtcatattta

SEQ ID NO: 7041 - DNA, 20 bp, Sus scrofa
tagacaagaatgtcatattt

SEQ ID NO: 7042 - DNA, 20 bp, Sus scrofa
cattcttgtctattttaata

SEQ ID NO: 7043 - DNA, 20 bp, Sus scrofa
agccacaaaacttctttggg

SEQ ID NO: 7044 - DNA, 20 bp, Sus scrofa
agaagccacaaaacttcttt

SEQ ID NO: 7045 - DNA, 20 bp, Sus scrofa
aagaagccacaaaacttctt

SEQ ID NO: 7046 - DNA, 20 bp, Sus scrofa
aaccgcccaaagaagttttg

SEQ ID NO: 7047 - DNA, 20 bp, Sus scrofa
gaagttttgtggcttctttc

SEQ ID NO: 7048 - DNA, 20 bp, Sus scrofa
aagttttgtggcttctttct

SEQ ID NO: 7049 - DNA, 20 bp, Sus scrofa
tgtctgcaagttaaatcaga

SEQ ID NO: 7050 - DNA, 20 bp, Sus scrofa
tttaacttgcagacattaat

SEQ ID NO: 7051 - DNA, 20 bp, Sus scrofa
gcagacattaattggaagag

SEQ ID NO: 7052 - DNA, 20 bp, Sus scrofa
ttggaagagaggctacacag

SEQ ID NO: 7053 - DNA, 20 bp, Sus scrofa
gtggataagagctgtctttc

SEQ ID NO: 7054 - DNA, 20 bp, Sus scrofa
actcttgggttctactctgc

SEQ ID NO: 7055 - DNA, 20 bp, Sus scrofa
gaaggatgtctcatactctt

SEQ ID NO: 7056 - DNA, 20 bp, Sus scrofa
agaaggatgtctcatactct

SEQ ID NO: 7057 - DNA, 20 bp, Sus scrofa
gaaaagatagagatagcaga

SEQ ID NO: 7058 - DNA, 20 bp, Sus scrofa
tctgctatctctatcttttc

SEQ ID NO: 7059 - DNA, 20 bp, Sus scrofa
tcacaatatatttaaatatt

SEQ ID NO: 7060 - DNA, 20 bp, Sus scrofa
aatgctttattgatatttcg

SEQ ID NO: 7061 - DNA, 20 bp, Sus scrofa
atgctttattgatatttcga

SEQ ID NO: 7062 - DNA, 20 bp, Sus scrofa
atttcgagggaagataatgt

SEQ ID NO: 7063 - DNA, 20 bp, Sus scrofa
tttcgagggaagataatgta

SEQ ID NO: 7064 - DNA, 20 bp, Sus scrofa
ggggattaaatctatattgg

SEQ ID NO: 7065 - DNA, 20 bp, Sus scrofa
aatggggattaaatctatat

SEQ ID NO: 7066 - DNA, 20 bp, Sus scrofa
gtaaagggacttagtaaatg

SEQ ID NO: 7067 - DNA, 20 bp, Sus scrofa
tgtaaagggacttagtaaat

SEQ ID NO: 7068 - DNA, 20 bp, Sus scrofa
atgtaaagggacttagtaaa

SEQ ID NO: 7069 - DNA, 20 bp, Sus scrofa
tccacttaatgaaatgtaaa

SEQ ID NO: 7070 - DNA, 20 bp, Sus scrofa
atccacttaatgaaatgtaa

SEQ ID NO: 7071 - DNA, 20 bp, Sus scrofa
tccctttacatttcattaag

SEQ ID NO: 7072 - DNA, 20 bp, Sus scrofa
gctcatttctcattaagtgt

SEQ ID NO: 7073 - DNA, 20 bp, Sus scrofa
ctcatttctcattaagtgtt

SEQ ID NO: 7074 - DNA, 20 bp, Sus scrofa
atggagcaaaggtaatcaac

SEQ ID NO: 7075 - DNA, 20 bp, Sus scrofa
gggcaaaattcatggagcaa

SEQ ID NO: 7076 - DNA, 20 bp, Sus scrofa
gaaaaaaggggcaaaattca

SEQ ID NO: 7077 - DNA, 20 bp, Sus scrofa
tgagtttaacaggaaaaaag

SEQ ID NO: 7078 - DNA, 20 bp, Sus scrofa
ctgagtttaacaggaaaaaa

SEQ ID NO: 7079 - DNA, 20 bp, Sus scrofa
tctgagtttaacaggaaaaa

SEQ ID NO: 7080 - DNA, 20 bp, Sus scrofa
ctcaagtatctgagtttaac

SEQ ID NO: 7081 - DNA, 20 bp, Sus scrofa
ctgttaaactcagatacttg

SEQ ID NO: 7082 - DNA, 20 bp, Sus scrofa
tgttaaactcagatacttga

SEQ ID NO: 7083 - DNA, 20 bp, Sus scrofa
aaactaattttaaaaaaata

SEQ ID NO: 7084 - DNA, 20 bp, Sus scrofa
aaaactaattttaaaaaaat

SEQ ID NO: 7085 - DNA, 20 bp, Sus scrofa
ggaaatggggattgatttgg

SEQ ID NO: 7086 - DNA, 20 bp, Sus scrofa
attggaaatggggattgatt

SEQ ID NO: 7087 - DNA, 20 bp, Sus scrofa
ttgctttaacattggaaatg

SEQ ID NO: 7088 - DNA, 20 bp, Sus scrofa
tttgctttaacattggaaat

SEQ ID NO: 7089 - DNA, 20 bp, Sus scrofa
gtttgctttaacattggaaa

SEQ ID NO: 7090 - DNA, 20 bp, Sus scrofa
ataaatgtttgctttaacat

SEQ ID NO: 7091 - DNA, 20 bp, Sus scrofa
tattgtgttttgctttattc

SEQ ID NO: 7092 - DNA, 20 bp, Sus scrofa
attgtgttttgctttattca

SEQ ID NO: 7093 - DNA, 20 bp, Sus scrofa
gcatcatatgaggatacaat

SEQ ID NO: 7094 - DNA, 20 bp, Sus scrofa
tgcatcatatgaggatacaa

SEQ ID NO: 7095 - DNA, 20 bp, Sus scrofa
tctcttctctgcatcatatg

SEQ ID NO: 7096 - DNA, 20 bp, Sus scrofa
ttggtttcctcctttctaac

SEQ ID NO: 7097 - DNA, 20 bp, Sus scrofa
gagaaactgtcctgttagaa

SEQ ID NO: 7098 - DNA, 20 bp, Sus scrofa
aaactgtcctgttagaaagg

SEQ ID NO: 7099 - DNA, 20 bp, Sus scrofa
tttatcctgcggcttaaact

SEQ ID NO: 7100 - DNA, 20 bp, Sus scrofa
ggaaaccaagtttaagccgc

SEQ ID NO: 7101 - DNA, 20 bp, Sus scrofa
cctacttgccatttatcctg

SEQ ID NO: 7102 - DNA, 20 bp, Sus scrofa
agtttaagccgcaggataaa

SEQ ID NO: 7103 - DNA, 20 bp, Sus scrofa
ccgcaggataaatggcaagt

SEQ ID NO: 7104 - DNA, 20 bp, Sus scrofa
cgcaggataaatggcaagta

SEQ ID NO: 7105 - DNA, 20 bp, Sus scrofa
agtgcaaagaatgatggact

SEQ ID NO: 7106 - DNA, 20 bp, Sus scrofa
aagggcagtgcaaagaatga

SEQ ID NO: 7107 - DNA, 20 bp, Sus scrofa
atcattctttgcactgccct

SEQ ID NO: 7108 - DNA, 20 bp, Sus scrofa
tcattctttgcactgccctt

SEQ ID NO: 7109 - DNA, 20 bp, Sus scrofa
aaagaaaagacaggtcccaa

SEQ ID NO: 7110 - DNA, 20 bp, Sus scrofa
aaaagaaaagacaggtccca

SEQ ID NO: 7111 - DNA, 20 bp, Sus scrofa
tgtaaattaaaagaaaagac

SEQ ID NO: 7112 - DNA, 20 bp, Sus scrofa
cagcttaggtcaatttgggt

SEQ ID NO: 7113 - DNA, 20 bp, Sus scrofa
ctcccagcttaggtcaattt

SEQ ID NO: 7114 - DNA, 20 bp, Sus scrofa
actcccagcttaggtcaatt

SEQ ID NO: 7115 - DNA, 20 bp, Sus scrofa
ctacccaaattgacctaagc

SEQ ID NO: 7116 - DNA, 20 bp, Sus scrofa
tacccaaattgacctaagct

SEQ ID NO: 7117 - DNA, 20 bp, Sus scrofa
cctgttctaactcccagctt

SEQ ID NO: 7118 - DNA, 20 bp, Sus scrofa
cctaagctgggagttagaac

SEQ ID NO: 7119 - DNA, 20 bp, Sus scrofa
gagcactaaattaagtgctt

SEQ ID NO: 7120 - DNA, 20 bp, Sus scrofa
tttatgcagcccatctgact

SEQ ID NO: 7121 - DNA, 20 bp, Sus scrofa
cttaggctctcccagtcaga

SEQ ID NO: 7122 - DNA, 20 bp, Sus scrofa
ttttatgcagcccatctgac

SEQ ID NO: 7123 - DNA, 20 bp, Sus scrofa
ttaggctctcccagtcagat

SEQ ID NO: 7124 - DNA, 20 bp, Sus scrofa
ctcgtcattaacacaaacaa

SEQ ID NO: 7125 - DNA, 20 bp, Sus scrofa
aatgacgagtctatcaattt

SEQ ID NO: 7126 - DNA, 20 bp, Sus scrofa
atgacgagtctatcaattta

SEQ ID NO: 7127 - DNA, 20 bp, Sus scrofa
tttagggtcatagaaaactt

SEQ ID NO: 7128 - DNA, 20 bp, Sus scrofa
gtactctgttctagagaaaa

SEQ ID NO: 7129 - DNA, 20 bp, Sus scrofa
ggtactctgttctagagaaa

SEQ ID NO: 7130 - DNA, 20 bp, Sus scrofa
tttctctagaacagagtacc

SEQ ID NO: 7131 - DNA, 20 bp, Sus scrofa
tagcaaggaaaggtactgcc

SEQ ID NO: 7132 - DNA, 20 bp, Sus scrofa
gccagtgacctagcaaggaa

SEQ ID NO: 7133 - DNA, 20 bp, Sus scrofa
aggcagtacctttccttgct

SEQ ID NO: 7134 - DNA, 20 bp, Sus scrofa
caatggccagtgacctagca

SEQ ID NO: 7135 - DNA, 20 bp, Sus scrofa
acctttccttgctaggtcac

SEQ ID NO: 7136 - DNA, 20 bp, Sus scrofa
gttgccatgagattaggcaa

SEQ ID NO: 7137 - DNA, 20 bp, Sus scrofa
actagggttgccatgagatt

SEQ ID NO: 7138 - DNA, 20 bp, Sus scrofa
ctggccattgcctaatctca

SEQ ID NO: 7139 - DNA, 20 bp, Sus scrofa
aaaaaaatcaaagatgacta

SEQ ID NO: 7140 - DNA, 20 bp, Sus scrofa
gaaaaaaatcaaagatgact

SEQ ID NO: 7141 - DNA, 20 bp, Sus scrofa
gtcatctttgatttttttct

SEQ ID NO: 7142 - DNA, 20 bp, Sus scrofa
atctttgatttttttcttgg

SEQ ID NO: 7143 - DNA, 20 bp, Sus scrofa
ctgctctgcctctgaatgtt

SEQ ID NO: 7144 - DNA, 20 bp, Sus scrofa
gtcaatgtcctaacattcag

SEQ ID NO: 7145 - DNA, 20 bp, Sus scrofa
gagcagaagcaaatgttgtg

SEQ ID NO: 7146 - DNA, 20 bp, Sus scrofa
agcagaagcaaatgttgtgt

SEQ ID NO: 7147 - DNA, 20 bp, Sus scrofa
ttgtgtgggagttgtttgca

SEQ ID NO: 7148 - DNA, 20 bp, Sus scrofa
tgtgtgggagttgtttgcat

SEQ ID NO: 7149 - DNA, 20 bp, Sus scrofa
ttgcatgggtgtttctgacc

SEQ ID NO: 7150 - DNA, 20 bp, Sus scrofa
tgcatgggtgtttctgacct

SEQ ID NO: 7151 - DNA, 20 bp, Sus scrofa
atgggtgtttctgacctggg

SEQ ID NO: 7152 - DNA, 20 bp, Sus scrofa
ccctaaccacatcaccgccc

SEQ ID NO: 7153 - DNA, 20 bp, Sus scrofa
ttctgacctgggcggtgatg

SEQ ID NO: 7154 - DNA, 20 bp, Sus scrofa
acctgggcggtgatgtggtt

SEQ ID NO: 7155 - DNA, 20 bp, Sus scrofa
cctgggcggtgatgtggtta

SEQ ID NO: 7156 - DNA, 20 bp, Sus scrofa
gtgatgtggttagggccctt

SEQ ID NO: 7157 - DNA, 20 bp, Sus scrofa
atgtggttagggccctttgg

SEQ ID NO: 7158 - DNA, 20 bp, Sus scrofa
agactttcatatccaccaaa

SEQ ID NO: 7159 - DNA, 20 bp, Sus scrofa
cagactttcatatccaccaa

SEQ ID NO: 7160 - DNA, 20 bp, Sus scrofa
tatgaaagtctgaatcccct

SEQ ID NO: 7161 - DNA, 20 bp, Sus scrofa
ctcatatttcactgtccaag

SEQ ID NO: 7162 - DNA, 20 bp, Sus scrofa
tctcatatttcactgtccaa

SEQ ID NO: 7163 - DNA, 20 bp, Sus scrofa
ttctcatatttcactgtcca

SEQ ID NO: 7164 - DNA, 20 bp, Sus scrofa
caaagcagatcctctgcaaa

SEQ ID NO: 7165 - DNA, 20 bp, Sus scrofa
taaatatttaccatttgcag

SEQ ID NO: 7166 - DNA, 20 bp, Sus scrofa
ctttgtacgatacaccaaag

SEQ ID NO: 7167 - DNA, 20 bp, Sus scrofa
cacacataaagcatccactt

SEQ ID NO: 7168 - DNA, 20 bp, Sus scrofa
tccactctggagaaatgttg

SEQ ID NO: 7169 - DNA, 20 bp, Sus scrofa
tcctcaacatttctccagag

SEQ ID NO: 7170 - DNA, 20 bp, Sus scrofa
catgctatgtctctccactc

SEQ ID NO: 7171 - DNA, 20 bp, Sus scrofa
cagagtggagagacatagca

SEQ ID NO: 7172 - DNA, 20 bp, Sus scrofa
cttcctcatgtgtaaaacgt

SEQ ID NO: 7173 - DNA, 20 bp, Sus scrofa
gcttcctcatgtgtaaaacg

SEQ ID NO: 7174 - DNA, 20 bp, Sus scrofa
tggcccacgttttacacatg

SEQ ID NO: 7175 - DNA, 20 bp, Sus scrofa
ttttacacatgaggaagctg

SEQ ID NO: 7176 - DNA, 20 bp, Sus scrofa
acatgaggaagctgaggctt

SEQ ID NO: 7177 - DNA, 20 bp, Sus scrofa
aggaagctgaggcttaggag

SEQ ID NO: 7178 - DNA, 20 bp, Sus scrofa
aggtgtgtgactctggacaa

SEQ ID NO: 7179 - DNA, 20 bp, Sus scrofa
caggtgtgtgactctggaca

SEQ ID NO: 7180 - DNA, 20 bp, Sus scrofa
gcctgccaggtgtgtgactc

SEQ ID NO: 7181 - DNA, 20 bp, Sus scrofa
cttgtccagagtcacacacc

SEQ ID NO: 7182 - DNA, 20 bp, Sus scrofa
tccagagtcacacacctggc

SEQ ID NO: 7183 - DNA, 20 bp, Sus scrofa
ggctctgtcactggcctgcc

SEQ ID NO: 7184 - DNA, 20 bp, Sus scrofa
tggcactgtggctctgtcac

SEQ ID NO: 7185 - DNA, 20 bp, Sus scrofa
gccctgggtgtgtggcactg

SEQ ID NO: 7186 - DNA, 20 bp, Sus scrofa
cccagatagccctgggtgtg

SEQ ID NO: 7187 - DNA, 20 bp, Sus scrofa
agccacagtgccacacaccc

SEQ ID NO: 7188 - DNA, 20 bp, Sus scrofa
gccacagtgccacacaccca

SEQ ID NO: 7189 - DNA, 20 bp, Sus scrofa
aggctttcccagatagccct

SEQ ID NO: 7190 - DNA, 20 bp, Sus scrofa
caggctttcccagatagccc

SEQ ID NO: 7191 - DNA, 20 bp, Sus scrofa
gccacacacccagggctatc

SEQ ID NO: 7192 - DNA, 20 bp, Sus scrofa
ccacacacccagggctatct

SEQ ID NO: 7193 - DNA, 20 bp, Sus scrofa
cagaagaatggcaggcactc

SEQ ID NO: 7194 - DNA, 20 bp, Sus scrofa
agcaagttcagaagaatggc

SEQ ID NO: 7195 - DNA, 20 bp, Sus scrofa
gaacagcaagttcagaagaa

SEQ ID NO: 7196 - DNA, 20 bp, Sus scrofa
gaacttgctgttcagattcc

SEQ ID NO: 7197 - DNA, 20 bp, Sus scrofa
gagacccacctagtacatcc

SEQ ID NO: 7198 - DNA, 20 bp, Sus scrofa
ttcagattcctggatgtact

SEQ ID NO: 7199 - DNA, 20 bp, Sus scrofa
agattcctggatgtactagg

SEQ ID NO: 7200 - DNA, 20 bp, Sus scrofa
gattcctggatgtactaggt

SEQ ID NO: 7201 - DNA, 20 bp, Sus scrofa
tatccttaagttgtaacttc

SEQ ID NO: 7202 - DNA, 20 bp, Sus scrofa
tctcctgaagttacaactta

SEQ ID NO: 7203 - DNA, 20 bp, Sus scrofa
ttaaggataaataaaactgt

SEQ ID NO: 7204 - DNA, 20 bp, Sus scrofa
taaaactgtaggagaaagtg

SEQ ID NO: 7205 - DNA, 20 bp, Sus scrofa
aaaactgtaggagaaagtgt

SEQ ID NO: 7206 - DNA, 20 bp, Sus scrofa
aaactgtaggagaaagtgtg

SEQ ID NO: 7207 - DNA, 20 bp, Sus scrofa
aactgtaggagaaagtgtgg

SEQ ID NO: 7208 - DNA, 20 bp, Sus scrofa
tgtaggagaaagtgtggggg

SEQ ID NO: 7209 - DNA, 20 bp, Sus scrofa
gtaggagaaagtgtgggggc

SEQ ID NO: 7210 - DNA, 20 bp, Sus scrofa
taggagaaagtgtgggggcg

SEQ ID NO: 7211 - DNA, 20 bp, Sus scrofa
aggagaaagtgtgggggcgg

SEQ ID NO: 7212 - DNA, 20 bp, Sus scrofa
tgtgggggcgggggaaatgt

SEQ ID NO: 7213 - DNA, 20 bp, Sus scrofa
gtgggggcgggggaaatgtt

SEQ ID NO: 7214 - DNA, 20 bp, Sus scrofa
aatactttcagaagtcaaaa

SEQ ID NO: 7215 - DNA, 20 bp, Sus scrofa
gtggttgatgaggatgagga

SEQ ID NO: 7216 - DNA, 20 bp, Sus scrofa
gtatgtggttgatgaggatg

SEQ ID NO: 7217 - DNA, 20 bp, Sus scrofa
caaaatgtatgtggttgatg

SEQ ID NO: 7218 - DNA, 20 bp, Sus scrofa
gacggtgttcaaaatgtatg

SEQ ID NO: 7219 - DNA, 20 bp, Sus scrofa
agaactgggctcaaagtaga

SEQ ID NO: 7220 - DNA, 20 bp, Sus scrofa
ttgcattgactgtaagaact

SEQ ID NO: 7221 - DNA, 20 bp, Sus scrofa
attgcattgactgtaagaac

SEQ ID NO: 7222 - DNA, 20 bp, Sus scrofa
aatgtccctgtagtaagcag

SEQ ID NO: 7223 - DNA, 20 bp, Sus scrofa
tgaatgcctctgcttactac

SEQ ID NO: 7224 - DNA, 20 bp, Sus scrofa
gaatgcctctgcttactaca

SEQ ID NO: 7225 - DNA, 20 bp, Sus scrofa
cattaatcgagagacaaaga

SEQ ID NO: 7226 - DNA, 20 bp, Sus scrofa
ggcatcaattcaaacttcct

SEQ ID NO: 7227 - DNA, 20 bp, Sus scrofa
tctcttaaaaaaggtgtcca

SEQ ID NO: 7228 - DNA, 20 bp, Sus scrofa
tggcccaggtctcttaaaaa

SEQ ID NO: 7229 - DNA, 20 bp, Sus scrofa
gacaccttttttaagagacc

SEQ ID NO: 7230 - DNA, 20 bp, Sus scrofa
acaccttttttaagagacct

SEQ ID NO: 7231 - DNA, 20 bp, Sus scrofa
ggggatggtttggatggccc

SEQ ID NO: 7232 - DNA, 20 bp, Sus scrofa
gctttgggggatggtttgga

SEQ ID NO: 7233 - DNA, 20 bp, Sus scrofa
aagggctttgggggatggtt

SEQ ID NO: 7234 - DNA, 20 bp, Sus scrofa
tttagaagggctttggggga

SEQ ID NO: 7235 - DNA, 20 bp, Sus scrofa
agaatttagaagggctttgg

SEQ ID NO: 7236 - DNA, 20 bp, Sus scrofa
tagaatttagaagggctttg

SEQ ID NO: 7237 - DNA, 20 bp, Sus scrofa
ttagaatttagaagggcttt

SEQ ID NO: 7238 - DNA, 20 bp, Sus scrofa
cttagaatttagaagggctt

SEQ ID NO: 7239 - DNA, 20 bp, Sus scrofa
tgccttcttagaatttagaa

SEQ ID NO: 7240 - DNA, 20 bp, Sus scrofa
ttgccttcttagaatttaga

SEQ ID NO: 7241 - DNA, 20 bp, Sus scrofa
agcccttctaaattctaaga

SEQ ID NO: 7242 - DNA, 20 bp, Sus scrofa
aaaatgtttaatgtttatta

SEQ ID NO: 7243 - DNA, 20 bp, Sus scrofa
aaatttggcctaaaactaat

SEQ ID NO: 7244 - DNA, 20 bp, Sus scrofa
atggatagcctattagtttt

SEQ ID NO: 7245 - DNA, 20 bp, Sus scrofa
actctaccatctcagaaatt

SEQ ID NO: 7246 - DNA, 20 bp, Sus scrofa
tttaggccaaatttctgaga

SEQ ID NO: 7247 - DNA, 20 bp, Sus scrofa
cccaatgtaatgtgtaaata

SEQ ID NO: 7248 - DNA, 20 bp, Sus scrofa
gccgtatttacacattacat

SEQ ID NO: 7249 - DNA, 20 bp, Sus scrofa
ccgtatttacacattacatt

SEQ ID NO: 7250 - DNA, 20 bp, Sus scrofa
tacactacacacagatattc

SEQ ID NO: 7251 - DNA, 20 bp, Sus scrofa
tatctgtgtgtagtgtattt

SEQ ID NO: 7252 - DNA, 20 bp, Sus scrofa
gcagtaaaactgtgctttaa

SEQ ID NO: 7253 - DNA, 20 bp, Sus scrofa
tttagagttctaccattatt

SEQ ID NO: 7254 - DNA, 20 bp, Sus scrofa
atcaacaaaactcctaataa

SEQ ID NO: 7255 - DNA, 20 bp, Sus scrofa
gagttttgttgatgtttatt

SEQ ID NO: 7256 - DNA, 20 bp, Sus scrofa
ttgttttctagcatattgtt

SEQ ID NO: 7257 - DNA, 20 bp, Sus scrofa
gcatgtctgaattattcata

SEQ ID NO: 7258 - DNA, 20 bp, Sus scrofa
catgtctgaattattcatat

SEQ ID NO: 7259 - DNA, 20 bp, Sus scrofa
ttttggccacttctttagaa

SEQ ID NO: 7260 - DNA, 20 bp, Sus scrofa
atgggtcctttctaaagaag

SEQ ID NO: 7261 - DNA, 20 bp, Sus scrofa
ctctgaatccgtgacatttt

SEQ ID NO: 7262 - DNA, 20 bp, Sus scrofa
agaagtggccaaaaatgtca

SEQ ID NO: 7263 - DNA, 20 bp, Sus scrofa
ggattcagagtttcagaaac

SEQ ID NO: 7264 - DNA, 20 bp, Sus scrofa
ttcagagtttcagaaacagg

SEQ ID NO: 7265 - DNA, 20 bp, Sus scrofa
gaaacaggaggccctgtgtt

SEQ ID NO: 7266 - DNA, 20 bp, Sus scrofa
ctattgactagcctaacaca

SEQ ID NO: 7267 - DNA, 20 bp, Sus scrofa
tctattgactagcctaacac

SEQ ID NO: 7268 - DNA, 20 bp, Sus scrofa
atagagttagaaaatgtgct

SEQ ID NO: 7269 - DNA, 20 bp, Sus scrofa
tagagttagaaaatgtgctt

SEQ ID NO: 7270 - DNA, 20 bp, Sus scrofa
agagttagaaaatgtgcttg

SEQ ID NO: 7271 - DNA, 20 bp, Sus scrofa
cactgttgagcattaagatc

SEQ ID NO: 7272 - DNA, 20 bp, Sus scrofa
actgttgagcattaagatca

SEQ ID NO: 7273 - DNA, 20 bp, Sus scrofa
ctgttgagcattaagatcag

SEQ ID NO: 7274 - DNA, 20 bp, Sus scrofa
ttttttgtacatccattcct

SEQ ID NO: 7275 - DNA, 20 bp, Sus scrofa
tttttgtacatccattccta

SEQ ID NO: 7276 - DNA, 20 bp, Sus scrofa
tcaatattattccctaggaa

SEQ ID NO: 7277 - DNA, 20 bp, Sus scrofa
actgttcaatattattccct

SEQ ID NO: 7278 - DNA, 20 bp, Sus scrofa
gaataatattgaacagtaaa

SEQ ID NO: 7279 - DNA, 20 bp, Sus scrofa
agtataaattcttcacttaa

SEQ ID NO: 7280 - DNA, 20 bp, Sus scrofa
gaatttatactgagcctctg

SEQ ID NO: 7281 - DNA, 20 bp, Sus scrofa
aatttatactgagcctctgt

SEQ ID NO: 7282 - DNA, 20 bp, Sus scrofa
atttatactgagcctctgtg

SEQ ID NO: 7283 - DNA, 20 bp, Sus scrofa
ttaggcagctttccccacag

SEQ ID NO: 7284 - DNA, 20 bp, Sus scrofa
atagaaccacaagtaaattt

SEQ ID NO: 7285 - DNA, 20 bp, Sus scrofa
aagctgcctaaatttacttg

SEQ ID NO: 7286 - DNA, 20 bp, Sus scrofa
ggggaactcttttcacaaaa

SEQ ID NO: 7287 - DNA, 20 bp, Sus scrofa
tggggaactcttttcacaaa

SEQ ID NO: 7288 - DNA, 20 bp, Sus scrofa
aatagcaccccagacaactg

SEQ ID NO: 7289 - DNA, 20 bp, Sus scrofa
aaatagcaccccagacaact

SEQ ID NO: 7290 - DNA, 20 bp, Sus scrofa
aaaagagttccccagttgtc

SEQ ID NO: 7291 - DNA, 20 bp, Sus scrofa
gaaatagcaccccagacaac

SEQ ID NO: 7292 - DNA, 20 bp, Sus scrofa
aaagagttccccagttgtct

SEQ ID NO: 7293 - DNA, 20 bp, Sus scrofa
aagagttccccagttgtctg

SEQ ID NO: 7294 - DNA, 20 bp, Sus scrofa
caacattttttccccctctt

SEQ ID NO: 7295 - DNA, 20 bp, Sus scrofa
atgcgttcttgccaaagagg

SEQ ID NO: 7296 - DNA, 20 bp, Sus scrofa
aatgcgttcttgccaaagag

SEQ ID NO: 7297 - DNA, 20 bp, Sus scrofa
gaatgcgttcttgccaaaga

SEQ ID NO: 7298 - DNA, 20 bp, Sus scrofa
ggaatgcgttcttgccaaag

SEQ ID NO: 7299 - DNA, 20 bp, Sus scrofa
ctttggcaagaacgcattcc

SEQ ID NO: 7300 - DNA, 20 bp, Sus scrofa
tttggcaagaacgcattcct

SEQ ID NO: 7301 - DNA, 20 bp, Sus scrofa
tccctgaactccggaagccc

SEQ ID NO: 7302 - DNA, 20 bp, Sus scrofa
agaacgcattcctgggcttc

SEQ ID NO: 7303 - DNA, 20 bp, Sus scrofa
ttcctgggcttccggagttc

SEQ ID NO: 7304 - DNA, 20 bp, Sus scrofa
actagacagtccctgaactc

SEQ ID NO: 7305 - DNA, 20 bp, Sus scrofa
tcctgggcttccggagttca

SEQ ID NO: 7306 - DNA, 20 bp, Sus scrofa
gagttcagggactgtctagt

SEQ ID NO: 7307 - DNA, 20 bp, Sus scrofa
tgacatgcagctttcagatt

SEQ ID NO: 7308 - DNA, 20 bp, Sus scrofa
ccccagccctagggctcaca

SEQ ID NO: 7309 - DNA, 20 bp, Sus scrofa
tccccagccctagggctcac

SEQ ID NO: 7310 - DNA, 20 bp, Sus scrofa
cgtttctccctgtgagccct

SEQ ID NO: 7311 - DNA, 20 bp, Sus scrofa
gtttctccctgtgagcccta

SEQ ID NO: 7312 - DNA, 20 bp, Sus scrofa
ctccctgtgagccctagggc

SEQ ID NO: 7313 - DNA, 20 bp, Sus scrofa
gatagttgtccccagcccta

SEQ ID NO: 7314 - DNA, 20 bp, Sus scrofa
tccctgtgagccctagggct

SEQ ID NO: 7315 - DNA, 20 bp, Sus scrofa
agatagttgtccccagccct

SEQ ID NO: 7316 - DNA, 20 bp, Sus scrofa
ccctgtgagccctagggctg

SEQ ID NO: 7317 - DNA, 20 bp, Sus scrofa
ctatcttaaagaaagacctc

SEQ ID NO: 7318 - DNA, 20 bp, Sus scrofa
tatcttaaagaaagacctca

SEQ ID NO: 7319 - DNA, 20 bp, Sus scrofa
atcttaaagaaagacctcag

SEQ ID NO: 7320 - DNA, 20 bp, Sus scrofa
ttatgtaaatcagtcccctg

SEQ ID NO: 7321 - DNA, 20 bp, Sus scrofa
gatttacataagcacattat

SEQ ID NO: 7322 - DNA, 20 bp, Sus scrofa
ttattggatcagcgacctct

SEQ ID NO: 7323 - DNA, 20 bp, Sus scrofa
gccacgtacactgatccaag

SEQ ID NO: 7324 - DNA, 20 bp, Sus scrofa
acctcttggatcagtgtacg

SEQ ID NO: 7325 - DNA, 20 bp, Sus scrofa
cagtgtacgtggctgttttg

SEQ ID NO: 7326 - DNA, 20 bp, Sus scrofa
agaacagagttaagagcaac

SEQ ID NO: 7327 - DNA, 20 bp, Sus scrofa
tgttgctcttaactctgttc

SEQ ID NO: 7328 - DNA, 20 bp, Sus scrofa
gttgctcttaactctgttct

SEQ ID NO: 7329 - DNA, 20 bp, Sus scrofa
gttctgggtctgtgctccca

SEQ ID NO: 7330 - DNA, 20 bp, Sus scrofa
ttctgggtctgtgctcccaa

SEQ ID NO: 7331 - DNA, 20 bp, Sus scrofa
attctcactgaacagccctt

SEQ ID NO: 7332 - DNA, 20 bp, Sus scrofa
tattctcactgaacagccct

SEQ ID NO: 7333 - DNA, 20 bp, Sus scrofa
cagtgagaataaaatcaatg

SEQ ID NO: 7334 - DNA, 20 bp, Sus scrofa
agtgagaataaaatcaatgt

SEQ ID NO: 7335 - DNA, 20 bp, Sus scrofa
cttcattttcttcatcaaag

SEQ ID NO: 7336 - DNA, 20 bp, Sus scrofa
ctctttgatgaagaaaatga

SEQ ID NO: 7337 - DNA, 20 bp, Sus scrofa
aaatgaaggtttgtgagtgc

SEQ ID NO: 7338 - DNA, 20 bp, Sus scrofa
atctggtccttgagagcaaa

SEQ ID NO: 7339 - DNA, 20 bp, Sus scrofa
tatctggtccttgagagcaa

SEQ ID NO: 7340 - DNA, 20 bp, Sus scrofa
tcagcaaccctttgctctca

SEQ ID NO: 7341 - DNA, 20 bp, Sus scrofa
aacctaggtggtctactatc

SEQ ID NO: 7342 - DNA, 20 bp, Sus scrofa
gaccagatagtagaccacct

SEQ ID NO: 7343 - DNA, 20 bp, Sus scrofa
taaggcctacaaaacctagg

SEQ ID NO: 7344 - DNA, 20 bp, Sus scrofa
gactaaggcctacaaaacct

SEQ ID NO: 7345 - DNA, 20 bp, Sus scrofa
gtagaccacctaggttttgt

SEQ ID NO: 7346 - DNA, 20 bp, Sus scrofa
agtggctgtaacaaagacta

SEQ ID NO: 7347 - DNA, 20 bp, Sus scrofa
gctataagggcaaagtggag

SEQ ID NO: 7348 - DNA, 20 bp, Sus scrofa
cttgagctataagggcaaag

SEQ ID NO: 7349 - DNA, 20 bp, Sus scrofa
tggcttctcttgagctataa

SEQ ID NO: 7350 - DNA, 20 bp, Sus scrofa
gtggcttctcttgagctata

SEQ ID NO: 7351 - DNA, 20 bp, Sus scrofa
acttgtttaggaactttgtg

SEQ ID NO: 7352 - DNA, 20 bp, Sus scrofa
acagccacactcacttgttt

SEQ ID NO: 7353 - DNA, 20 bp, Sus scrofa
agttcctaaacaagtgagtg

SEQ ID NO: 7354 - DNA, 20 bp, Sus scrofa
gtttgtaaactaactttcac

SEQ ID NO: 7355 - DNA, 20 bp, Sus scrofa
agttagtttacaaacacgag

SEQ ID NO: 7356 - DNA, 20 bp, Sus scrofa
tagtttacaaacacgagagg

SEQ ID NO: 7357 - DNA, 20 bp, Sus scrofa
agtttacaaacacgagaggc

SEQ ID NO: 7358 - DNA, 20 bp, Sus scrofa
tacaaacacgagaggcgggc

SEQ ID NO: 7359 - DNA, 20 bp, Sus scrofa
aacacgagaggcgggcagga

SEQ ID NO: 7360 - DNA, 20 bp, Sus scrofa
acacgagaggcgggcaggat

SEQ ID NO: 7361 - DNA, 20 bp, Sus scrofa
cagggcttggcaaactgtgc

SEQ ID NO: 7362 - DNA, 20 bp, Sus scrofa
ctctgctttaaagcagggct

SEQ ID NO: 7363 - DNA, 20 bp, Sus scrofa
aaaatctctgctttaaagca

SEQ ID NO: 7364 - DNA, 20 bp, Sus scrofa
caaaatctctgctttaaagc

SEQ ID NO: 7365 - DNA, 20 bp, Sus scrofa
acggtgtctgtataattctt

SEQ ID NO: 7366 - DNA, 20 bp, Sus scrofa
tacggtgtctgtataattct

SEQ ID NO: 7367 - DNA, 20 bp, Sus scrofa
aaccttgtcttcaggatcta

SEQ ID NO: 7368 - DNA, 20 bp, Sus scrofa
tgaaacaaaaccttgtcttc

SEQ ID NO: 7369 - DNA, 20 bp, Sus scrofa
caccgtagatcctgaagaca

SEQ ID NO: 7370 - DNA, 20 bp, Sus scrofa
tttcatctatatctcttccc

SEQ ID NO: 7371 - DNA, 20 bp, Sus scrofa
ttcaatattcacaagggcct

SEQ ID NO: 7372 - DNA, 20 bp, Sus scrofa
tttcaatattcacaagggcc

SEQ ID NO: 7373 - DNA, 20 bp, Sus scrofa
atctatttcaatattcacaa

SEQ ID NO: 7374 - DNA, 20 bp, Sus scrofa
aatctatttcaatattcaca

SEQ ID NO: 7375 - DNA, 20 bp, Sus scrofa
taaggattttgatacttcat

SEQ ID NO: 7376 - DNA, 20 bp, Sus scrofa
aaaataaatgttgatgttta

SEQ ID NO: 7377 - DNA, 20 bp, Sus scrofa
ttctctaaaaaaatattaag

SEQ ID NO: 7378 - DNA, 20 bp, Sus scrofa
cttaatatttttttagagaa

SEQ ID NO: 7379 - DNA, 20 bp, Sus scrofa
cccacaaatttagcatttaa

SEQ ID NO: 7380 - DNA, 20 bp, Sus scrofa
acctttaaatgctaaatttg

SEQ ID NO: 7381 - DNA, 20 bp, Sus scrofa
cctttaaatgctaaatttgt

SEQ ID NO: 7382 - DNA, 20 bp, Sus scrofa
atttgtgggagttcctgttg

SEQ ID NO: 7383 - DNA, 20 bp, Sus scrofa
caaacctgctgaaccacaac

SEQ ID NO: 7384 - DNA, 20 bp, Sus scrofa
agttcctgttgtggttcagc

SEQ ID NO: 7385 - DNA, 20 bp, Sus scrofa
ctgttgtggttcagcaggtt

SEQ ID NO: 7386 - DNA, 20 bp, Sus scrofa
atcctcacagacactgtgct

SEQ ID NO: 7387 - DNA, 20 bp, Sus scrofa
catcctcacagacactgtgc

SEQ ID NO: 7388 - DNA, 20 bp, Sus scrofa
aacccagcacagtgtctgtg

SEQ ID NO: 7389 - DNA, 20 bp, Sus scrofa
gaggatgtcagtttgatccc

SEQ ID NO: 7390 - DNA, 20 bp, Sus scrofa
aggatgtcagtttgatccct

SEQ ID NO: 7391 - DNA, 20 bp, Sus scrofa
taatccactgaatgagccca

SEQ ID NO: 7392 - DNA, 20 bp, Sus scrofa
ttaatccactgaatgagccc

SEQ ID NO: 7393 - DNA, 20 bp, Sus scrofa
tgatccctgggctcattcag

SEQ ID NO: 7394 - DNA, 20 bp, Sus scrofa
tgggctcattcagtggatta

SEQ ID NO: 7395 - DNA, 20 bp, Sus scrofa
taaggattcagcagtgctgc

SEQ ID NO: 7396 - DNA, 20 bp, Sus scrofa
ttcagcagtgctgcaggctg

SEQ ID NO: 7397 - DNA, 20 bp, Sus scrofa
attcagtgttgctgttgctg

SEQ ID NO: 7398 - DNA, 20 bp, Sus scrofa
ctgaataggagcagcagctg

SEQ ID NO: 7399 - DNA, 20 bp, Sus scrofa
tcccgggtgaggagctgaat

SEQ ID NO: 7400 - DNA, 20 bp, Sus scrofa
ctcctattcagctcctcacc

SEQ ID NO: 7401 - DNA, 20 bp, Sus scrofa
tcctattcagctcctcaccc

SEQ ID NO: 7402 - DNA, 20 bp, Sus scrofa
catatggaagttcccgggtg

SEQ ID NO: 7403 - DNA, 20 bp, Sus scrofa
tgtagcatatggaagttccc

SEQ ID NO: 7404 - DNA, 20 bp, Sus scrofa
ctgtagcatatggaagttcc

SEQ ID NO: 7405 - DNA, 20 bp, Sus scrofa
aaagctgctcctgtagcata

SEQ ID NO: 7406 - DNA, 20 bp, Sus scrofa
cgggaacttccatatgctac

SEQ ID NO: 7407 - DNA, 20 bp, Sus scrofa
taaaaagaaaaaataaataa

SEQ ID NO: 7408 - DNA, 20 bp, Sus scrofa
aataaataaaggttaaacgt

SEQ ID NO: 7409 - DNA, 20 bp, Sus scrofa
cctgggggcatatggatata

SEQ ID NO: 7410 - DNA, 20 bp, Sus scrofa
gaggggggcctgggggcata

SEQ ID NO: 7411 - DNA, 20 bp, Sus scrofa
ccatatatccatatgccccc

SEQ ID NO: 7412 - DNA, 20 bp, Sus scrofa
agcaaaagaggggggcctgg

SEQ ID NO: 7413 - DNA, 20 bp, Sus scrofa
aagcaaaagaggggggcctg

SEQ ID NO: 7414 - DNA, 20 bp, Sus scrofa
aaagcaaaagaggggggcct

SEQ ID NO: 7415 - DNA, 20 bp, Sus scrofa
aaaagcaaaagaggggggcc

SEQ ID NO: 7416 - DNA, 20 bp, Sus scrofa
ccctaaaaagcaaaagaggg

SEQ ID NO: 7417 - DNA, 20 bp, Sus scrofa
gccctaaaaagcaaaagagg

SEQ ID NO: 7418 - DNA, 20 bp, Sus scrofa
ggccctaaaaagcaaaagag

SEQ ID NO: 7419 - DNA, 20 bp, Sus scrofa
tggccctaaaaagcaaaaga

SEQ ID NO: 7420 - DNA, 20 bp, Sus scrofa
gtggccctaaaaagcaaaag

SEQ ID NO: 7421 - DNA, 20 bp, Sus scrofa
gcccccctcttttgcttttt

SEQ ID NO: 7422 - DNA, 20 bp, Sus scrofa
cccccctcttttgcttttta

SEQ ID NO: 7423 - DNA, 20 bp, Sus scrofa
acttccatatgttataggtg

SEQ ID NO: 7424 - DNA, 20 bp, Sus scrofa
tgggaacttccatatgttat

SEQ ID NO: 7425 - DNA, 20 bp, Sus scrofa
agggccacacctataacata

SEQ ID NO: 7426 - DNA, 20 bp, Sus scrofa
tataacatatggaagttccc

SEQ ID NO: 7427 - DNA, 20 bp, Sus scrofa
catatggaagttcccaggct

SEQ ID NO: 7428 - DNA, 20 bp, Sus scrofa
ctacaatctattcctagcct

SEQ ID NO: 7429 - DNA, 20 bp, Sus scrofa
gctacaatctattcctagcc

SEQ ID NO: 7430 - DNA, 20 bp, Sus scrofa
tagattgtagctgcagctgc

SEQ ID NO: 7431 - DNA, 20 bp, Sus scrofa
ctcagatccccaaactgctg

SEQ ID NO: 7432 - DNA, 20 bp, Sus scrofa
tggtctctgccacagcagtt

SEQ ID NO: 7433 - DNA, 20 bp, Sus scrofa
ggtctctgccacagcagttt

SEQ ID NO: 7434 - DNA, 20 bp, Sus scrofa
gtctctgccacagcagtttg

SEQ ID NO: 7435 - DNA, 20 bp, Sus scrofa
attgccatgacctgaggtgt

SEQ ID NO: 7436 - DNA, 20 bp, Sus scrofa
gtgtctgtgacctacacctc

SEQ ID NO: 7437 - DNA, 20 bp, Sus scrofa
tccagcattgccatgacctg

SEQ ID NO: 7438 - DNA, 20 bp, Sus scrofa
gtgacctacacctcaggtca

SEQ ID NO: 7439 - DNA, 20 bp, Sus scrofa
acctcaggtcatggcaatgc

SEQ ID NO: 7440 - DNA, 20 bp, Sus scrofa
ggcctcactcagtggggtta

SEQ ID NO: 7441 - DNA, 20 bp, Sus scrofa
atccctggcctcactcagtg

SEQ ID NO: 7442 - DNA, 20 bp, Sus scrofa
gatccctggcctcactcagt

SEQ ID NO: 7443 - DNA, 20 bp, Sus scrofa
cgatccctggcctcactcag

SEQ ID NO: 7444 - DNA, 20 bp, Sus scrofa
atccttaaccccactgagtg

SEQ ID NO: 7445 - DNA, 20 bp, Sus scrofa
taaccccactgagtgaggcc

SEQ ID NO: 7446 - DNA, 20 bp, Sus scrofa
aaccccactgagtgaggcca

SEQ ID NO: 7447 - DNA, 20 bp, Sus scrofa
tgcgatgctggttcgatccc

SEQ ID NO: 7448 - DNA, 20 bp, Sus scrofa
tatccatgaggatgcgatgc

SEQ ID NO: 7449 - DNA, 20 bp, Sus scrofa
gaaccagcatcgcatcctca

SEQ ID NO: 7450 - DNA, 20 bp, Sus scrofa
gaaccctgctagtatccatg

SEQ ID NO: 7451 - DNA, 20 bp, Sus scrofa
gcatcctcatggatactagc

SEQ ID NO: 7452 - DNA, 20 bp, Sus scrofa
catcctcatggatactagca

SEQ ID NO: 7453 - DNA, 20 bp, Sus scrofa
ccattgtggcccagcgagtt

SEQ ID NO: 7454 - DNA, 20 bp, Sus scrofa
tagcagggttcctaactcgc

SEQ ID NO: 7455 - DNA, 20 bp, Sus scrofa
agcagggttcctaactcgct

SEQ ID NO: 7456 - DNA, 20 bp, Sus scrofa
cctaactcgctgggccacaa

SEQ ID NO: 7457 - DNA, 20 bp, Sus scrofa
ctaactcgctgggccacaat

SEQ ID NO: 7458 - DNA, 20 bp, Sus scrofa
cctgtggggagttcccattg

SEQ ID NO: 7459 - DNA, 20 bp, Sus scrofa
ccacaatgggaactccccac

SEQ ID NO: 7460 - DNA, 20 bp, Sus scrofa
ttttaaaacgggggcctgtg

SEQ ID NO: 7461 - DNA, 20 bp, Sus scrofa
cttttaaaacgggggcctgt

SEQ ID NO: 7462 - DNA, 20 bp, Sus scrofa
ccttttaaaacgggggcctg

SEQ ID NO: 7463 - DNA, 20 bp, Sus scrofa
tctgatgccttttaaaacgg

SEQ ID NO: 7464 - DNA, 20 bp, Sus scrofa
gtctgatgccttttaaaacg

SEQ ID NO: 7465 - DNA, 20 bp, Sus scrofa
agtctgatgccttttaaaac

SEQ ID NO: 7466 - DNA, 20 bp, Sus scrofa
tagtctgatgccttttaaaa

SEQ ID NO: 7467 - DNA, 20 bp, Sus scrofa
ccacaggcccccgttttaaa

SEQ ID NO: 7468 - DNA, 20 bp, Sus scrofa
attttgagttttctttttac

SEQ ID NO: 7469 - DNA, 20 bp, Sus scrofa
ctcacagagagcaaaaaagg

SEQ ID NO: 7470 - DNA, 20 bp, Sus scrofa
cctcacagagagcaaaaaag

SEQ ID NO: 7471 - DNA, 20 bp, Sus scrofa
ccctcacagagagcaaaaaa

SEQ ID NO: 7472 - DNA, 20 bp, Sus scrofa
accctcacagagagcaaaaa

SEQ ID NO: 7473 - DNA, 20 bp, Sus scrofa
ccccttttttgctctctgtg

SEQ ID NO: 7474 - DNA, 20 bp, Sus scrofa
cccttttttgctctctgtga

SEQ ID NO: 7475 - DNA, 20 bp, Sus scrofa
tgctctctgtgagggtctct

SEQ ID NO: 7476 - DNA, 20 bp, Sus scrofa
ggtagtactataggtaagta

SEQ ID NO: 7477 - DNA, 20 bp, Sus scrofa
gaggacataggtagtactat

SEQ ID NO: 7478 - DNA, 20 bp, Sus scrofa
ttacaagattgggaggacat

SEQ ID NO: 7479 - DNA, 20 bp, Sus scrofa
gggtaaattacaagattggg

SEQ ID NO: 7480 - DNA, 20 bp, Sus scrofa
taagggtaaattacaagatt

SEQ ID NO: 7481 - DNA, 20 bp, Sus scrofa
ctaagggtaaattacaagat

SEQ ID NO: 7482 - DNA, 20 bp, Sus scrofa
gtctgttaagttttgactaa

SEQ ID NO: 7483 - DNA, 20 bp, Sus scrofa
ggtctgttaagttttgacta

SEQ ID NO: 7484 - DNA, 20 bp, Sus scrofa
tagtcaaaacttaacagacc

SEQ ID NO: 7485 - DNA, 20 bp, Sus scrofa
tgtatcagtatttcaatgcc

SEQ ID NO: 7486 - DNA, 20 bp, Sus scrofa
gacaggaaaacatctgactc

SEQ ID NO: 7487 - DNA, 20 bp, Sus scrofa
tctgagcaggtgaagtggac

SEQ ID NO: 7488 - DNA, 20 bp, Sus scrofa
agttttctgagcaggtgaag

SEQ ID NO: 7489 - DNA, 20 bp, Sus scrofa
gccccccaagttttctgagc

SEQ ID NO: 7490 - DNA, 20 bp, Sus scrofa
cttcacctgctcagaaaact

SEQ ID NO: 7491 - DNA, 20 bp, Sus scrofa
ttcacctgctcagaaaactt

SEQ ID NO: 7492 - DNA, 20 bp, Sus scrofa
tcacctgctcagaaaacttg

SEQ ID NO: 7493 - DNA, 20 bp, Sus scrofa
cacctgctcagaaaacttgg

SEQ ID NO: 7494 - DNA, 20 bp, Sus scrofa
acctgctcagaaaacttggg

SEQ ID NO: 7495 - DNA, 20 bp, Sus scrofa
ccagttaagatctagaaact

SEQ ID NO: 7496 - DNA, 20 bp, Sus scrofa
ccaagtttctagatcttaac

SEQ ID NO: 7497 - DNA, 20 bp, Sus scrofa
actgaagttctaaacaaatg

SEQ ID NO: 7498 - DNA, 20 bp, Sus scrofa
ggtgttgcaacaaaacttga

SEQ ID NO: 7499 - DNA, 20 bp, Sus scrofa
tgcaacaaaacttgaaggta

SEQ ID NO: 7500 - DNA, 20 bp, Sus scrofa
ctcttctttcttgatttttg

SEQ ID NO: 7501 - DNA, 20 bp, Sus scrofa
actcttctttcttgattttt

SEQ ID NO: 7502 - DNA, 20 bp, Sus scrofa
cactcttctttcttgatttt

SEQ ID NO: 7503 - DNA, 20 bp, Sus scrofa
ctcttctttcttgatttttg

SEQ ID NO: 7504 - DNA, 20 bp, Sus scrofa
actcttctttcttgattttt

SEQ ID NO: 7505 - DNA, 20 bp, Sus scrofa
cactcttctttcttgatttt

SEQ ID NO: 7506 - DNA, 20 bp, Sus scrofa
aggctgggggaaaaagaaag

SEQ ID NO: 7507 - DNA, 20 bp, Sus scrofa
taggctgggggaaaaagaaa

SEQ ID NO: 7508 - DNA, 20 bp, Sus scrofa
gtaggctgggggaaaaagaa

SEQ ID NO: 7509 - DNA, 20 bp, Sus scrofa
caggagtcaatgtaggctgg

SEQ ID NO: 7510 - DNA, 20 bp, Sus scrofa
gcaggagtcaatgtaggctg

SEQ ID NO: 7511 - DNA, 20 bp, Sus scrofa
ggcaggagtcaatgtaggct

SEQ ID NO: 7512 - DNA, 20 bp, Sus scrofa
aggcaggagtcaatgtaggc

SEQ ID NO: 7513 - DNA, 20 bp, Sus scrofa
agaaaggcaggagtcaatgt

SEQ ID NO: 7514 - DNA, 20 bp, Sus scrofa
cagctatttttcagaaaggc

SEQ ID NO: 7515 - DNA, 20 bp, Sus scrofa
gatgcagctatttttcagaa

SEQ ID NO: 7516 - DNA, 20 bp, Sus scrofa
ctagtaaagcacaaagtgtg

SEQ ID NO: 7517 - DNA, 20 bp, Sus scrofa
tctagtaaagcacaaagtgt

SEQ ID NO: 7518 - DNA, 20 bp, Sus scrofa
gtctagtaaagcacaaagtg

SEQ ID NO: 7519 - DNA, 20 bp, Sus scrofa
tgtgctttactagactcctt

SEQ ID NO: 7520 - DNA, 20 bp, Sus scrofa
cataaatgtaaatactccaa

SEQ ID NO: 7521 - DNA, 20 bp, Sus scrofa
aaattcttgagatttctact

SEQ ID NO: 7522 - DNA, 20 bp, Sus scrofa
taaggtggtagtataggagg

SEQ ID NO: 7523 - DNA, 20 bp, Sus scrofa
ctaaggtggtagtataggag

SEQ ID NO: 7524 - DNA, 20 bp, Sus scrofa
tctaaggtggtagtatagga

SEQ ID NO: 7525 - DNA, 20 bp, Sus scrofa
ctctaaggtggtagtatagg

SEQ ID NO: 7526 - DNA, 20 bp, Sus scrofa
gtgctctaaggtggtagtat

SEQ ID NO: 7527 - DNA, 20 bp, Sus scrofa
aagcagtcagtgctctaagg

SEQ ID NO: 7528 - DNA, 20 bp, Sus scrofa
atcaagcagtcagtgctcta

SEQ ID NO: 7529 - DNA, 20 bp, Sus scrofa
ctgactgcttgataatcaag

SEQ ID NO: 7530 - DNA, 20 bp, Sus scrofa
tgactgcttgataatcaagc

SEQ ID NO: 7531 - DNA, 20 bp, Sus scrofa
ataatcaagcgggttcttac

SEQ ID NO: 7532 - DNA, 20 bp, Sus scrofa
caaacagagtttaatatatc

SEQ ID NO: 7533 - DNA, 20 bp, Sus scrofa
atctagttttaatgtttcaa

SEQ ID NO: 7534 - DNA, 20 bp, Sus scrofa
tcctctagagaattttcttt

SEQ ID NO: 7535 - DNA, 20 bp, Sus scrofa
gccaaaagaaaattctctag

SEQ ID NO: 7536 - DNA, 20 bp, Sus scrofa
gaaaattctctagaggatag

SEQ ID NO: 7537 - DNA, 20 bp, Sus scrofa
ctctagaggatagtggtaga

SEQ ID NO: 7538 - DNA, 20 bp, Sus scrofa
tccttcgcaacctttctatt

SEQ ID NO: 7539 - DNA, 20 bp, Sus scrofa
aatctagtgacctaatagaa

SEQ ID NO: 7540 - DNA, 20 bp, Sus scrofa
acctaatagaaaggttgcga

SEQ ID NO: 7541 - DNA, 20 bp, Sus scrofa
ttgaaatgttttcctatgta

SEQ ID NO: 7542 - DNA, 20 bp, Sus scrofa
ctacctactcagccttacat

SEQ ID NO: 7543 - DNA, 20 bp, Sus scrofa
tttcctatgtaaggctgagt

SEQ ID NO: 7544 - DNA, 20 bp, Sus scrofa
tcctaaagaggtaaaactct

SEQ ID NO: 7545 - DNA, 20 bp, Sus scrofa
gcctagagttttacctcttt

SEQ ID NO: 7546 - DNA, 20 bp, Sus scrofa
acaaaacccacctcctaaag

SEQ ID NO: 7547 - DNA, 20 bp, Sus scrofa
tagagttttacctctttagg

SEQ ID NO: 7548 - DNA, 20 bp, Sus scrofa
agttttacctctttaggagg

SEQ ID NO: 7549 - DNA, 20 bp, Sus scrofa
gttttacctctttaggaggt

SEQ ID NO: 7550 - DNA, 20 bp, Sus scrofa
ggttttgttgcttgttcctt

SEQ ID NO: 7551 - DNA, 20 bp, Sus scrofa
aaatgtacctcctaaaccaa

SEQ ID NO: 7552 - DNA, 20 bp, Sus scrofa
gttgcttgttcctttggttt

SEQ ID NO: 7553 - DNA, 20 bp, Sus scrofa
gcttgttcctttggtttagg

SEQ ID NO: 7554 - DNA, 20 bp, Sus scrofa
tccaactttttctgaagaaa

SEQ ID NO: 7555 - DNA, 20 bp, Sus scrofa
tccttttcttcagaaaaagt

SEQ ID NO: 7556 - DNA, 20 bp, Sus scrofa
gttggagtgtctgaaaagcc

SEQ ID NO: 7557 - DNA, 20 bp, Sus scrofa
cctcacagttaaagagatcc

SEQ ID NO: 7558 - DNA, 20 bp, Sus scrofa
cctggatctctttaactgtg

SEQ ID NO: 7559 - DNA, 20 bp, Sus scrofa
cactctctcgatagtcattc

SEQ ID NO: 7560 - DNA, 20 bp, Sus scrofa
ccaggtagctcagctggggc

SEQ ID NO: 7561 - DNA, 20 bp, Sus scrofa
ccatccaggtagctcagctg

SEQ ID NO: 7562 - DNA, 20 bp, Sus scrofa
gccatccaggtagctcagct

SEQ ID NO: 7563 - DNA, 20 bp, Sus scrofa
agccatccaggtagctcagc

SEQ ID NO: 7564 - DNA, 20 bp, Sus scrofa
cctgccccagctgagctacc

SEQ ID NO: 7565 - DNA, 20 bp, Sus scrofa
ccccagctgagctacctgga

SEQ ID NO: 7566 - DNA, 20 bp, Sus scrofa
cgtctctgtcatagccatcc

SEQ ID NO: 7567 - DNA, 20 bp, Sus scrofa
gatggctatgacagagacga

SEQ ID NO: 7568 - DNA, 20 bp, Sus scrofa
cacctcggcatctgagtcag

SEQ ID NO: 7569 - DNA, 20 bp, Sus scrofa
ccacctcggcatctgagtca

SEQ ID NO: 7570 - DNA, 20 bp, Sus scrofa
tccacctcggcatctgagtc

SEQ ID NO: 7571 - DNA, 20 bp, Sus scrofa
agcccctgactcagatgccg

SEQ ID NO: 7572 - DNA, 20 bp, Sus scrofa
ccctgactcagatgccgagg

SEQ ID NO: 7573 - DNA, 20 bp, Sus scrofa
ttcatccacaccatccacct

SEQ ID NO: 7574 - DNA, 20 bp, Sus scrofa
gactcagatgccgaggtgga

SEQ ID NO: 7575 - DNA, 20 bp, Sus scrofa
agatgccgaggtggatggtg

SEQ ID NO: 7576 - DNA, 20 bp, Sus scrofa
ggatggtgtggatgaagaag

SEQ ID NO: 7577 - DNA, 200 bp, Sus scrofa
gggaactggcaggcctcccgggcatagcccctcctgcgctctatttaccttcttaagtttgtttaactttggtaagtttgcgactgaggtgaggcctacacgagctctttcacctggaaagacaaggccggcgtgaatggggtgaggaatggggcccaagaccggggaggggacaggaggcagaccagaaggcacctcta

SEQ ID NO: 7578 - DNA, 200 bp, Sus scrofa
ggttacttctaacaccttaatgatatgtgtttctttttgtgtttgtgtgccgtgtgcatttttccctttaacagcttgagctcagtgacaatagaatctaacctttggtaagtagttgagaatttggaaaacaggactttctggtcattttcattttcatatttctttatggtgagggaaataattgaaagttataatgg
